(19) United States
(12) Patent Application Publication
(10) Pub. No.: US 2012/0219584 A1
(43) Pub. Date: Aug. 30, 2012

(54) PROTECTION AGAINST PANDEMIC AND SEASONAL STRAINS OF INFLUENZA

(75) Inventors: Gary J. Nabel, Washington, DC (US); Chih-Jen Wei, Potomac, MD (US); Zhi-Yong Yang, Potomac, MD (US); Jeffrey Boyington, Clarksburg, MD (US)

(73) Assignee: THE UNITED STATES OF AMERICA as represented by THE SECRETARY, DEPARTMENT OF HEALTH, Bethesda, MD (US)

(21) Appl. No.: 13/500,421

(22) PCT Filed: Oct. 5, 2010
(86) PCT No.: PCT/US2010/051512

§ 371 Date: May 9, 2012

Related U.S. Application Data
(60) Provisional application No. 61/248,835, filed on Oct. 5, 2009.

(51) Int. Cl. A61K 39/145; C07K 14/11; A61P 37/04; C12Q 1/70; A61P 31/16; C12N 15/63; C12N 15/44

(52) U.S. Cl. 424/209.1; 435/320.1; 530/396; 536/23.72; 435/5

(57) ABSTRACT

Immunogens and compositions are provided that encode a protein comprising an influenza A subtype H1 hemagglutinin glycan-shielded receptor binding domain A (RBD A) region and at least one influenza A subtype H1 hemagglutinin antigenic site wherein the antigenic site is not within the RBD-A region. Also provided are immunogens and compositions that encode an immunogenic protein comprising at least one epitope of the RBD-A region of a pandemic influenza A subtype H1 hemagglutinin antigen. Also provided are such proteins, nucleic acids that encode such proteins, and antibodies against such proteins. Also provided are methods to use such immunogens and compositions to elicit a neutralizing antibody immune response against influenza A subtype H1 virus.

[0001] This application claims the benefit of U.S. Provisional Patent Application No. 61/248,835, filed Oct. 5, 2009, which is hereby expressly incorporated by reference in its entirety.

### FIELD

[0002] The invention relates to influenza immunogens and vaccines. More specifically, the invention relates to influenza immunogens and vaccines comprising nucleic acid molecules or proteins that protect an individual from pandemic and/or seasonal strains of influenza.

### BACKGROUND

[0003] New H1N1 influenza viruses have emerged episodically over the last century to cause human pandemics, notably in 1918 and recently in 2009. Pandemic viruses typically evolve into seasonal forms that develop resistance to antibody neutralization, and cross-protection between strains separated by more than three years is uncommon.

[0004] The pandemic influenza A (H1N1) 2009 has spread widely after its adaptation to humans. Its rapid global dissemination led to its designation as a pandemic strain by the World Health Organization less than two months after the virus was first identified. The prototypic pandemic H1N1 influenza virus emerged in 1918 and gave rise to seasonal strains that began to diminish in the late 1950s; see, for example, Kilbourne, ED, 2006, Emerg. Infect. Dis. 12, 9-14; Taubenberger, J K, et. Al, 2006, Emerg. Infect. Dis. 12, 15-22. A resurgence of H1N1 viruses occurred in 1977, reestablishing the H1N1 seasonal strains presently in circulation. In contrast to these human-adapted viruses, A (H1N1) 2009 represents a recent cross-species transmission of a virus previously predominantly confined to swine.

[0005] Influenza outbreaks are driven by the evolution of diverse viral strains that evade human immunity. Immune protection is mediated predominantly by neutralizing antibodies directed to the hemagglutinin (HA) of these viruses, and co-evolution of HA and neuraminidase (NA) generates variant strains that become resistant to neutralization. Yearly influenza vaccine programs have relied on surveillance of circulating viruses and the identification of strains likely to emerge and cause disease; see, for example, http://www.who.int/csr/disease/influenza/mission/en/.

[0006] An alternative approach to influenza prevention is the generation of universal influenza vaccines. This strategy is based on the premise that invariant regions of the viral proteins can be identified as targets of the immune response. Several broadly neutralizing antibodies directed against the viral HA have been identified; see, for example, Okuno Y, et al, 1993, J Virol 67, 2552; Ekiert D C, et al, 2009, Science 324, 246; Sui J, et al, 2009, Nat Struct Mol Biol 16, 265; Kashyap A K, et al, 2008, Proc Natl Acad Sci USA 105, 5986; and the structural basis of antibody recognition and neutralization has been recently elucidated; see, for example, Ekiert D C, et al, ibid; Sui, J et al, 2009, ibid. While this knowledge has identified at least one functionally conserved and constrained target of neutralizing antibodies, it has not been possible to elicit broadly neutralizing antibodies by vaccination.

[0007] There remains a need for an influenza vaccine that confers protection not only against the influenza strains that have antigens corresponding to the vaccine but also against heterologous strains, such as pandemic strains and/or seasonal strains. There also remains a need for an influenza vaccine that can reduce or eradicate pandemic strains and/or that can slow or prevent the evolution of seasonal strains.

### SUMMARY

[0008] The present invention relates to the novel discovery that two distant, pandemic strains of influenza A virus are able to elicit cross-neutralizing antibodies. Based on this discovery, the present invention describes a mechanism for eliciting protection against pandemic influenza as well as seasonal influenza. Specifically, differences in glycosylation patterns between the hemagglutinin protein of pandemic and seasonal influenza A viruses affect the ability of antibodies to bind to the receptor binding domain of the hemagglutinin protein. Such differences can be used to develop more effective vaccines. One embodiment of the invention comprises a pandemic influenza virus, the hemagglutinin protein of which lacks glycosylation sites normally present in the hemagglutinin protein of non-pandemic influenza viruses. Another embodiment of the invention is a DNA vaccine that encodes at least one epitope from a pandemic virus hemagglutinin protein that lacks glycosylation sites present in the hemagglutinin protein of non-pandemic influenza viruses. In another embodiment, a vaccine of the present invention comprises a peptide comprising at least one epitope from a hemagglutinin protein receptor binding domain that lacks glycosylation sites present in the hemagglutinin protein of non-pandemic influenza viruses. According to the present invention such peptides can be monomers or they can be multimers, such as a trimer. As described herein, the present invention also relates to the use of such vaccines to protect a patient at risk for being infected with influenza A virus from being infected by influenza A virus. It is understood by those in the art that such protection can be prophylactic or it can be therapeutic. The present invention also relates to proteins useful for formulating vaccines of the present invention, as well as nucleic acid molecules encoding such proteins. Such proteins comprise at least a portion of a hemagglutinin protein from a pandemic hemagglutinin protein lacking glycosylation sites normally present in the hemagglutinin protein of non-pandemic influenza viruses. The invention also relates to nucleic acid molecules encoding portions of, or the entire, hemagglutinin protein from both pandemic and non-pandemic influenza A viruses. The invention also describes hemagglutinin proteins from pandemic strains, such as influenza A(H1N1)2009, that have been mutated to contain glycosylation sites, such that the mutant proteins can be used as potential vaccines. Another embodiment of the present invention is a neutralizing antibody that binds one or more epitopes in the receptor binding domain of the hemagglutinin protein, wherein such epitopes are shielded from antibody binding by glycan in the hemagglutinin of non-pandemic influenza virus. Another embodiment of the invention is a method to detect the emergence of non-pandemic strains by detecting glycosylation of the receptor binding domain of the hemagglutinin protein.

[0009] The disclosure provides an immunogen comprising a nucleic acid construct comprising a nucleic acid molecule encoding a protein comprising an influenza A subtype H1 hemagglutinin glycan-shielded receptor binding domain A (RBD-A) region and at least one influenza A subtype H1 hemagglutinin antigenic site wherein the antigenic site is not within the RBD-A region. The antigenic site elicits the production of neutralizing antibodies against an antigenic site of a pandemic influenza A subtype H1 HA. The glycan-shielded RBD-A region is homologous to the RBD-A region of the pandemic influenza A subtype H1 HA, with the exception that the glycan-shielded RBD-A region comprises at least one N-linked glycosylation site and the pandemic RBD-A region lacks any N-glycosylation sites. The antigenic site can be an HA1 globular head antigenic site or an HA2 antigenic site. Also included is a composition comprising any of such immunogens. The disclosure also provides a method to elicit a neutralizing antibody immune response against an influenza A subtype H1 virus in a subject; the method comprises administering to the subject any of such immunogens or compositions. Such a method can confer protection against influenza. The disclosure also provides a protein comprising at least a portion of a hemagglutinin antigen having an amino acid sequence selected from the group consisting of SEQ ID NO:27, SEQ ID NO:31, SEQ ID NO:35, SEQ ID NO:39, SEQ ID NO:43, and SEQ ID NO:47.

[0010] The disclosure provides an immunogen comprising a nucleic acid construct comprising a nucleic acid molecule that encodes an immunogenic protein comprising at least one epitope of the receptor binding domain A (RBD-A) region of a pandemic influenza A subtype H1 hemagglutinin antigen. The encoded RBD-A region is lacking any N-linked glycosylation site that is present in the RBD-A region of a non-pandemic influenza A subtype H1 hemagglutinin antigen. The immunogenic protein elicits a neutralizing antibody immune response against a homologous pandemic influenza A subtype H1 virus strain and against a heterologous pandemic influenza A subtype H1 virus strain. Also included is a composition comprising any of such immunogens. Also included is a method to elicit a neutralizing antibody immune response against an influenza A subtype H1 virus in a subject comprising administering to the subject any of such immunogens or compositions. Such a method can confer protection against influenza. Also included is a method to reduce pandemic influenza A subtype H1 virus in an animal reservoir comprising administering to animals in the reservoir any of such immunogens or compositions. The disclosure also provides a method to elicit a neutralizing antibody immune response against a pandemic influenza A subtype H1 virus; the method comprises administering to a subject an immunogen comprising a nucleic acid molecule encoding a pandemic influenza A subtype H1 hemagglutinin antigen (HA), wherein the HA is heterologous to the virus against which an immune response is being elicited, and wherein the immunogen elicits the immune response.

[0011] The disclosure provides an immunogen comprising nucleic acid construct VRC 9328. Also included is a composition comprising such an immunogen. Also provided is a method to elicit a neutralizing antibody immune response against an influenza A subtype H1 virus in a subject; the method comprises administering to the subject any of such immunogens or compositions.

[0012] The disclosure provides a method to detect the emergence of a non-pandemic influenza A subtype H1 virus from a pandemic population of influenza A subtype H1 virus; the method comprises (a) isolating a biological sample containing influenza A virus; and (b) testing the hemagglutinin antigen of the virus for the presence of N-linked glycans at positions corresponding to amino acids 136, 142, 144, 172, 177 and 179 of SEQ ID NO:3. The presence of glycan at any of the positions indicates the emergence of a non-pandemic virus.

### BRIEF DESCRIPTION OF THE FIGURES

[0013] FIG. 1. Cross-neutralization, HI reactivity, and specificity of antisera to H1N1 (1918 SC) and A (H1N1) 2009 (CA 04/09) in contrast to a seasonal strain, H1N1 (1999 NC). a, Neutralization activity of antisera from mice immunized with the indicated nucleic acid construct or plasmid containing no insert (control) was measured by luciferase assay with 1918 SC (left), A (H1N1) 2009 (CA 04/09) (middle), or 1999 NC (right) HA-pseudotyped lentiviral vectors. b, Hemagglutination inhibition by antisera from mice immunized with control or the indicated nucleic acid construct was performed with 1918 HA-pseudotyped virus, and H1N1 A (H1N1) 2009 (CA 04/09) and 1999 NC viruses. c, Antisera from mice immunized with a nucleic acid construct encoding 1918 SC, A (H1N1) 2009 (CA 04/09) or 1999 NC HA protein were pre-absorbed with HIV (control), 1918 SC, 2009 (CA 04/09), or 1999 NC HA trimers and the neutralization activities of the pre-absorbed antisera were measured with 1918 SC and 1999 New Caledonia HA-pseudotyped lentiviral vectors. Percent reduction in neutralization was recorded at 1:800 serum dilution.

[0014] FIG. 2. Glycosylation patterns of H1N1 HAs. a, Ribbon diagrams (side and top views) of HA depicting N-linked glycosylation on the pandemic 1918 SC and A (H1N1) 2009 strains (left panels) and the seasonal 1999 NC H1N1 strain (right panels). The asparagine side chains of glycosylation sites were rendered as blue CPK models. The glycosylation sites 142 and 177 (1918 numbering) on the top of the RBD are circled by a dotted line. b, Same as in a, except that glycosylations were modeled as mature, sialic acid-containing glycosylations using the GlyProt Server (Bohne-Lang, A. & der Lieth, C. W. GlyProt: in silico glycosylation of proteins. Nucleic Acids Res. 33, W214-W219 (2005)) and rendered as blue stick models. c, Top panel is a table summarizing the presence of glycosylation sites on H1N1 strains during various time frames from 1918 to the present. The numbers indicate residues (1918 numbering) predicted to have glycosylations in at least 50% of the sequences for that particular time period. Glycosylations on the top of the RBD are highlighted yellow. The bottom panel illustrates the placement of these glycosylation sites on ribbon diagrams of 1918 HA. The glycosylations are depicted by side chain CPK models. Glycosylations present in 1918 are colored red and all additional glycosylations after 1918 are colored blue. PDB entry 1RUZ (1918 SC) was used for displaying the H1N1 pandemic strain HAs and the seasonal 1999 NC H1N1 HA was displayed using the structure of the A/PR/8/34 HA (PDB entry 1RU7). All structural panels were generated using the molecular graphics program UCSF Chimera (Pettersen, E. F. et al. UCSF Chimera—a visualization system for exploratory research and analysis. J. Comput. Chem. 25, 1605-1612 (2004)).

[0015] FIG. 3. Analysis of purified wild-type HA and glycosylation mutant HA proteins by SDS-PAGE and MALDI-MS. (A) Nucleic acid constructs encoding the ectodomain of wild-type (1918 and 2009) and glycosylation mutant (1918 (2G) and 2009 (2G)) HA proteins were prepared using the mammalian expression vector CMV/R 8κB, and were transiently transfected into 293F renal epithelial cells with or without the presence of swainsonine and kifunsensine to generate recombinant proteins. Glycosylation of 1918 SC and 2009 Ca HA proteins was confirmed by the increase in the size of the HA band (band #1, compare 1918 to 1918 (2G), and 2009 to 2009 (2G)). HA proteins made in the presence of swainsonine and kifunsensine were further treated with Endo H. Upon Endo H digestion (band #20), both wild-type and mutant HA proteins collapsed to the same size, indicating the removal of complex carbohydrates and high mannose N-linked glycans. (B) MALDI-MS analysis of 1918 and 1918 (2G) HA proteins.

[0016] FIG. 4. Map and sequence for nucleic acid construct CMV/R 8 kb Influenza A/South Carolina/1/18(H1N1). (SEQ ID NO:1)

[0017] FIG. 5. Map and sequence for nucleic acid construct CMV/R 8 kb Influenza A/South Carolina/1/18(H1N1)HA mut A short foldon-His (SEQ ID NO:5).

[0018] FIG. 6. Map and sequence for nucleic acid construct CMV/R 8 kb Influenza A/Brevig Mission/1/18(H1N1) NA (SEQ ID NO:9).

[0019] FIG. 7. Map and sequence for nucleic acid construct CMV/R 8 kb Influenza A/New Caledonia/20/99 foldon-his AY 289929 (SEQ ID NO:13).

[0020] FIG. 8. Map and sequence for nucleic acid construct CMV/R Influenza A H1N1 California/4/2009 HA foldon His (SEQ ID NO:17).

[0021] FIG. 9. Map and sequence for nucleic acid construct CMV/R Influenza A H1N1 California/4/2009 NA BlueH (SEQ ID NO:21).

[0022] FIG. 10. Map and sequence for nucleic acid construct CMV/R Influenza A California 04 09 HA BlueH (+glycol @ 142 and 177 a.a) (SEQ ID NO:25).

[0023] FIG. 11. Map and sequence for nucleic acid construct CMV/R 8 kb Influenza A/South Carolina/1/18(H1N1)HA (+142 and 177 a.a.) (SEQ ID NO:29).

[0024] FIG. 12. Map and sequence for nucleic acid construct CMV/R Influenza A California 04 09 HA BlueH (+glycol @ 142 a.a.) (SEQ ID NO:33).

[0025] FIG. 13. Map and sequence for nucleic acid construct CMV/R Influenza A California 04 09 HA BlueH (+glycol @ 177 a.a.) (SEQ ID NO:37).

[0026] FIG. 14. Map and sequence for nucleic acid construct CMV/R 8 kb Influenza A/South Carolina/1/18(H1N1)HA (+glyc @ 142 a.a.) (SEQ ID NO:41).

[0027] FIG. 15. Map and sequence for nucleic acid construct CMV/R 8 kb Influenza A/South Carolina/1/18(H1N1)HA (+glycol @ 177 1.1.) (SEQ ID NO:45).

[0028] FIG. 16. Map and sequence for nucleic acid construct CMV/R Influenza A California 04 09 HA BlueH (SEQ ID NO:63).

[0029] FIG. 17. Map and sequence for nucleic acid construct CMV/R Influenza A/New Caledonia/20/1999(H1N1) NA (SEQ ID NO:119).

[0030] FIG. 18. Map and sequence for nucleic acid construct CMV/R 8 kb Influenza A/New Caledonia 20/99 (H1N1)wt.

[0031] FIG. 19. Map and sequence for nucleic acid construct CMV/R H1(Haishu/SWL110/2010/ADG21188 (SEQ ID NO:67).

[0032] FIG. 20. Map and sequence for nucleic acid construct CMV/R H1 (Netherlands/1493b/2009/ADJ40554) (SEQ ID NO:71).

[0033] FIG. 21. Map and sequence for nucleic acid construct CMV/R H1 (Orenburg/IIV-13/2010/ADF42661) ((SEQ ID NO:)75).

[0034] FIG. 22. Map and sequence for nucleic acid construct CMV/R H1 (Orenburg/IIV-13/2010/ADI99498) (SEQ ID NO:79).

[0035] FIG. 23. Map and sequence for nucleic acid construct CMV/R H1 (Russia/178/2009/ADA79597) (SEQ ID NO:83).

[0036] FIG. 24. Map and sequence for nucleic acid construct CMV/R H1 (Russia/180/2009/ADB81459) (SEQ ID NO:87).

[0037] FIG. 25. Map and sequence for nucleic acid construct CMV/R H1 (Salekhard/01/2009/ADA83044) ((SEQ ID NO:91).

[0038] FIG. 26. Map and sequence for nucleic acid construct CMV/R H1 (Tallinn/INS183/2010/ADG42553) (SEQ ID NO:95).

[0039] FIG. 27. Map and sequence for nucleic acid construct CMV/R H1 (Beijing/SE2649/2009/ADD64214) (SEQ ID NO:99).

[0040] FIG. 28. Map and sequence for nucleic acid construct CMV/R H1 (California/VRDL6/2010/ADI99550) (SEQ ID NO:103).

[0041] FIG. 29. Map and sequence for nucleic acid construct CMV/R(8 kb)-Influenza H1(A/PR8/8/34 HA/h N144Q (SEQ ID NO:107).

[0042] FIG. 30. Map and sequence for nucleic acid construct CMV/R 8 kb Influenza A/New Caledonia/20/99 (H1N1)wt N142Q (SEQ ID NO:111).

[0043] FIG. 31. Map and sequence for nucleic acid construct CMV/R 8 kb Influenza A/New Caledonia/20/99 (H1N1)wt N177Q (SEQ ID NO:115).

[0044] FIG. 32. Neutralization of wild-type and glycosylated mutant pseudotyped lentiviral vectors by mAb C179. (A) Comparable expression of wild-type and double glycosylation mutants of 1918 SC and 2009 CA HA protein in transfected 293 cells. Cells were stained with C179 mAb or isotype control IgG. (B) Neutralization sensitivities of the indicated wild-type and glycosylation mutant pseudotyped viruses were assessed with C179 mAb. The input wild-type and glycosylation mutant pseudotyped viruses were neutralized by C179 to similar degrees

[0045] FIG. 33. Addition of two glycosylation sites to 1918 SC or A (H1N1) 2009 confers resistance to neutralization. (A) Inhibition of neutralizating antibodies to 1918 SC and A (H1N1) 2009 measured on 1918 SC and A (H1N1) 2009 pseudotyped lentiviral vectors or 1999 NC on 1999 lentiviral vectors following absorption of sera with cells expressing the indicated HA protein or without absorption (Control). Percent reduction in neutralization was recorded at 1:400 serum dilution. (B) and (C), Comparable activity of 1918 SC and A (H1N1) 2009, and glycosylation mutants (1918 (2G), and 2009 (2G)) for viral entry using pseudotyped lentiviral vectors (left panels in B and C) and relative resistance of the 2G mutant pseudotyped vs. wild type reporters to neutralization by wild type 1918 SC antisera (middle) or A (H1N1) 2009 antisera (right) derived from DNA-vaccinated mice.

[0046] FIG. 34. Neutralization activity of 1918 SC and 209 CA antisera against glycosylated mutant viruses. Both 1918 (2G) and 2009 (2G) viruses were relatively resistant to neutralization by antisera to 1918 SC or 2009 CA. Percent reduction in neutralization was recorded at a 1:1,600 serum dilution.

[0047] FIG. 35. Addition of glycosylation sites to 1918 SC confers resistance to neutralization. Neutralization of wild-type and glycosylation mutants of 1918 SC viruses by antisera from mice immunized twice with a nucleic acid vector encoding either wild-type HA or glycosylation mutant 1918 SC HA protein. Percent reduction in neutralization was measured at a 1:200 serum dilution. The sera raised to the 1918 2G HA protein were unable to neutralize the 1999 NC virus.

### DETAILED DESCRIPTION

[0048] The present disclosure describes the novel finding of cross-neutralization between two distant pandemic strains, 1918 South Carolina and A(H1N1)2009. Both were resistant to seasonal virus antisera. Pandemic neutralizing antibodies were directed to the receptor binding domain (RBD) of the hemagglutinin (HA). In seasonal strains, this region is shielded by two highly conserved glycosylation sites absent in pandemic strains, and RBD glycosylation of pandemic HAs abrogated neutralization. Collectively, these findings suggest that H1N1 viruses lacking RBD glycosylation have caused pandemics, vaccination directed to these RBDs could protect against similar future pandemics, and glycosylated A(H1N1)2009 could serve as a vaccine to limit the evolution of this virus into seasonal influenza.

[0049] Before the present invention is further described, it is to be understood that this invention is not limited to particular embodiments described, as such may, of course, vary. It is also to be understood that the terminology used herein is for the purpose of describing particular embodiments only, and is not intended to be limiting, since the scope of the present invention will be limited only by the claims.

[0050] It must be noted that as used herein and in the appended claims, the singular forms “a,” “an,” and “the” include plural referents unless the context clearly dictates otherwise. It is further noted that the claims may be drafted to exclude any optional element. As such, this statement is intended to serve as antecedent basis for use of such exclusive terminology as “solely,” “only” and the like in connection with the recitation of claim elements, or use of a “negative” limitation.

[0051] It should be understood that as used herein, the term “a” entity or “an” entity refers to one or more of that entity. For example, a nucleic acid molecule refers to one or more nucleic acid molecules. As such, the terms “a”, “an”, “one or more” and “at least one” can be used interchangeably. Similarly the terms “comprising”, “including” and “having” can be used interchangeably.

[0052] The publications discussed herein are provided solely for their disclosure prior to the filing date of the present application. Nothing herein is to be construed as an admission that the present invention is not entitled to antedate such publication by virtue of prior invention. Further, the dates of publication provided may be different from the actual publication dates, which may need to be independently confirmed.

[0053] Unless defined otherwise, all technical and scientific terms used herein have the same meaning as commonly understood by one of ordinary skill in the art to which this invention belongs. Although any methods and materials similar or equivalent to those described herein can also be used in the practice or testing of the present invention, the preferred methods and materials are now described. All publications mentioned herein are incorporated herein by reference to disclose and describe the methods and/or materials in connection with which the publications are cited.

[0054] It is appreciated that certain features of the invention, which are, for clarity, described in the context of separate embodiments, may also be provided in combination in a single embodiment. Conversely, various features of the invention, which are, for brevity, described in the context of a single embodiment, may also be provided separately or in any suitable sub-combination. All combinations of the embodiments are specifically embraced by the present invention and are disclosed herein just as if each and every combination was individually and explicitly disclosed. In addition, all sub-combinations are also specifically embraced by the present invention and are disclosed herein just as if each and every such sub-combination was individually and explicitly disclosed herein.

### Glycan-Shielded Immunogens

[0055] The present disclosure provides a glycan-shielded immunogen and use thereof to elicit a neutralizing antibody immune response against a pandemic and/or seasonal influenza virus. As used herein, a glycan-shielded immunogen is (a) a nucleic acid molecule that encodes a protein that includes an influenza A subtype H1 hemagglutinin glycan-shielded receptor binding domain A (RBD-A) region and at least one influenza A subtype H1 hemagglutinin antigenic site that is not within an RBD-A region, or (b) a protein that includes an influenza A subtype H1 hemagglutinin glycan-shielded receptor binding domain A (RBD-A) region and at least one influenza A subtype H1 hemagglutinin antigenic site that is not within an RBD-A region.

[0056] As used herein, an immunogen is a compound that when administered to a subject elicits an immune response. Such an immune response can be a humoral immune response and/or a cellular immune response to an antigenic site present in an immunogen of the disclosure. As used herein, a humoral immune response refers to an immune response mediated by antibody molecules, including secretory (IgA) or IgG molecules, while a cellular immune response is one mediated by T-lymphocytes and/or other white blood cells. These responses can serve to neutralize infectivity, and/or mediate antibody-complement, or antibody dependent cell cytotoxicity (ADCC) to provide protection to an immunized host. Such responses can be determined using standard immunoassays and neutralization assays, well known in the art.

[0057] Influenza strains are typically categorized as influenza A, influenza B or influenza C strains. Influenza A strains are further divided into Group 1 and Group 2 strains. These Groups are further divided into subtypes based on their hemagglutinin proteins: Group 1 influenza A subtypes are H1, H2, H5, H7 and H9. Group 2 influenza A subtypes are H3, H4, H6, H8, H10, H11, H12, H13, H14, H15 and H16. Influenza hemagglutinin proteins are glycoproteins that are found on the surface of influenza viruses and are responsible for binding the virus to the cell that is being infected. Hemagglutinin proteins include antigenic sites that elicit an immune response in subjects infected by their respective virus. Hemagglutinin proteins are also the targets of influenza vaccines. The vaccines are designed, for example, to effect a neutralizing antibody response against the hemagglutinin proteins and thereby protect subjects from viral infection.

[0058] As used herein, an influenza hemagglutinin antigen, or HA, is a full-length influenza hemagglutinin protein or any epitope thereof. An epitope of a full-length influenza hemagglutinin protein refers to a portion of such protein that can elicit a neutralizing antibody response against the homologous influenza strain, i.e., a strain from which the HA is derived. In some embodiments, such an epitope can also elicit a neutralizing antibody response against a heterologous influenza strain, i.e., a strain having an HA that is not identical to that of the HA of the immunogen.

[0059] Hemagglutinin proteins found on an influenza virus surface are trimers of hemagglutinin protein monomers that are enzymatically cleaved to yield amino-terminal HA1 and carboxy-terminal HA2 polypeptides. The globular head consists exclusively by the major portion of the HA1 polypeptide, whereas the stem that anchors the hemagglutinin protein into the viral lipid envelope is comprised of HA2 and part of HA1. The globular head of a hemagglutinin protein includes two domains: the receptor binding domain (RBD), an ˜148-amino acid residue domain that includes the sialic acid-binding site, and the vestigial esterase domain, a smaller ˜75-amino acid residue region just below the RBD. The top part of the RBD adjacent to the 2,6-sialic acid recognition sites includes a large region (amino acids 131-143, 170-182, 205-215 and 257-262, 1918 numbering) (referred to herein as the RBD-A region) of over 6000 Å² per trimer that is 95% conserved between A/South Carolina/1/1918 (1918 SC) and A/California/04/2009 (2009 CA) pandemic strains. The globular head includes several antigenic sites that include immunodominant epitopes. Examples include the Sa, Sb, Ca₁, Ca₂ and Cb antigenic sites (see, for example, Caton A J et al, 1982, Cell 31, 417-427). The RBD-A region includes the Sa antigenic site and part of the Sb antigenic site.

[0060] As described in the present disclosure, the inventors surprisingly discovered that the RBD-A regions of seasonal influenza viruses are shielded by highly conserved glycosylation sites absent in pandemic strains, and that RBD glycosylation of pandemic HAs abrogated neutralization by immune sera directed against pandemic HAs. The RBD-A glycosylation sites are N-linked glycosylation sites that correspond to amino acid residues 142, 144, 172, 177, 179, and 136 of hemagglutinin protein (A/South Carolina/1/1918 (H1N1) HA numbering, or 1918 numbering); see, for example, Table 3. As used herein, a glycan-shielded receptor binding domain A (RBD-A) region is an RBD-A region that comprises an N-linked glycosylation site corresponding to amino acid position 142, 144, 172, 177, 179, and 136 of SEQ ID NO:3 (amino acid sequence of A/South Carolina/1/1918 (H1N1) HA). That is, a glycan-shielded RBD-A region has at least one N-linked saccharide attached to an asparagine (Asn) at one or more of amino acid positions (or residues) 142, 144, 172, 177, 179, and 136 (1918 numbering). It is to be appreciated that an N-linked glycosylation site is typically defined as the three-amino acid motif Asn-X-serine (Ser) or proline (Pro) where X is any amino acid except proline. As used herein, the term N-linked glycosylation site refers to the asparagine attachment site, even though the respective RBD-A region has the entire three-amino acid motif. It is also to be appreciated that SEQ ID NO:3 does not include any glycosylation sites in the RBD-A motif because that amino acid sequence represents the hemagglutinin protein of a pandemic strain; this SEQ ID NO is used simply for reference (i.e., 1918 numbering). In addition, the cited amino acid positions represent those in a full-length hemagglutinin protein although a hemagglutinin antigen of the disclosure need not comprise a full-length hemagglutinin protein.

[0061] According to the World Health Organization, “an influenza pandemic occurs when a new influenza virus emerges and spreads around the world, and most people do not have immunity. Viruses that have caused past pandemics typically originated from animal influenza viruses” (http://www.who.int/csedisease/swineflu/frequently_asked_questions/pandemic/en/index. html, Oct. 2, 2010). As used herein, a pandemic influenza A subtype H1 virus is an influenza A subtype H1 virus that has the above-stated characteristics and lacks N-linked glycosylation sites, and hence is not glycosylated, in the RBD-A region. Pandemic influenza viruses often represent a cross-species transmission of virus predominantly confined to a non-human animal reservoir. For example, influenza A (H1N1) 2009 represents a recent cross-species transmission of a virus previously predominantly confined to swine. Pandemic influenza viruses typically comprise an immunodominant RBD-A antigenic site that elicits immune responses targeted primarily toward the RBD-A region, and typically are not neutralized by an immune response against previous seasonal influenza vaccines.

[0062] One embodiment of the disclosure is an immunogen that comprises a nucleic acid construct comprising a nucleic acid molecule encoding a protein comprising an influenza H1 hemagglutinin glycan-shielded receptor binding domain A (RBD-A) region and at least one influenza A subtype H1 hemagglutinin antigenic site selected from the group consisting of an HA1 globular head antigenic site and an HA2 antigenic site, wherein the antigenic site is not within the RBD-A region. Such an antigenic site elicits the production of neutralizing antibodies against an antigenic site of a pandemic influenza A subtype H1 HA. Such a glycan-shielded RBD-A region is homologous to the RBD-A region of a pandemic influenza A subtype H1 HA, with the exception that the glycan-shielded RBD-A region comprises at least one N-linked glycosylation site and the pandemic RBD-A region lacks any N-glycosylation sites.

[0063] As used herein, the phrase “elicits the production of neutralizing antibodies against an antigenic site of a pandemic influenza A subtype H1 HA” means that the antigenic site can effect an immune response that results in neutralizing antibodies (i.e., a neutralizing antibody immune response) against a HA of a pandemic influenza A subtype H1 virus. Due to the nature of the immunogen, such an immune response is elicited against an antigenic site not within the RBD-A region of the pandemic HA. That is, the encoded protein comprises a RBD-A region that, due to glycan-shielding (i.e., masking, hiding) antigenic epitopes on the RBD-A region, does not stimulate a neutralizing antibody immune response against itself; instead, the encoded protein, also having an antigenic site that is not within the RBD-A region, directs the immune response away from the RBD-A region and toward the antigenic site. Such an immune response can have utility not only against the pandemic influenza A subtype H1 virus but also against an influenza virus that is evolving from the pandemic influenza virus into a seasonal influenza virus. Such an immune response can also have utility against a seasonal influenza virus. Without being bound by theory, it is believed that pandemic viral strains evolve to evade immune responses directed against them by acquiring mutations that encode glycosylation sites to shield the highly immunodominant epitopes in the RBD-A region that are neutralized by immune sera raised against pandemic viruses. It is to be appreciated that influenza strains also evolve by acquiring mutations to otherwise change the amino acid sequences of the HAs, thereby evading previously generated immune responses. In one embodiment, the pandemic influenza A subtype H1 virus is the most recent to have caused pandemic infection.

[0064] In one embodiment, an antigenic site is an influenza A subtype H1 HA1 globular head antigenic site, wherein the antigenic site is not within the RBD-A region. In one embodiment, an antigenic site is an influenza A subtype H1 HA2 antigenic site. In one embodiment, an antigenic site is an influenza A subtype H1 globular head antigenic site, such as, but not limited to, an Sb antigenic site, an Ca₁ antigenic site, an Ca₂ antigenic site or an Cb antigenic site. It is to be appreciated that amino acid residues 142 and 177 (1918 numbering) of the RBD-A region of an influenza A subtype H1 hemagglutinin protein are within the Sa antigenic site. In one embodiment, the nucleic acid construct encodes more than one antigenic site. Any antigenic site in the protein must have a proper three-dimensional structure to elicit a neutralizing antibody immune response against an influenza A subtype H1 virus. Typically, the protein forms a trimer analogous to what natural hemagglutinin proteins do. Assays to determine that the protein does elicit such a response are known to those skilled in the art.

[0065] As used herein, the phrase the “glycan-shielded RBD-A region is homologous to the RBD-A region of said pandemic influenza A subtype H1 HA” means that the amino acid sequence of the glycan-shielded RBD-A region is at least 80% identical to the amino acid sequence of the pandemic RBD-A region. In one embodiment, the amino acid sequence of the glycan-shielded RBD-A region is at least about 85% identical to the amino acid sequence of the pandemic RBD-A region. In one embodiment, the amino acid sequence of the glycan-shielded RBD-A region is at least about 90% identical to the amino acid sequence of the pandemic RBD-A region. In one embodiment, the amino acid sequence of the glycan-shielded RBD-A region is at least about 95% identical to the amino acid sequence of the pandemic RBD-A region.

[0066] As used herein a nucleic acid construct is a recombinant expression vector, i.e., a vector linked to a nucleic acid molecule encoding a protein such that the nucleic acid molecule can effect expression of the protein when the nucleic acid construct is administered to, for example, a subject or an organ, tissue or cell. The vector also enables transport of the nucleic acid molecule to a cell within an environment, such as, but not limited to, an organism, tissue, or cell culture. A nucleic acid construct of the present disclosure is produced by human intervention. The nucleic acid construct can be DNA, RNA or variants thereof. The vector can be a DNA plasmid, a viral vector, or other vector. In one embodiment, a vector can be a cytomegalovirus (CMV), retrovirus, adenovirus, adeno-associated virus, herpes virus, vaccinia virus, poliovirus, sindbis virus, or any other DNA or RNA virus vector. In one embodiment, a vector can be a pseudotyped lentiviral or retroviral vector. In one embodiment, a vector can be a DNA plasmid. In one embodiment, a vector can be a DNA plasmid comprising viral components and plasmid components to enable nucleic acid molecule delivery and expression. Methods for the construction of nucleic acid constructs of the present disclosure are well known. See, for example, Molecular Cloning: a Laboratory Manual, 3^{rd} edition, Sambrook et al. 2001 Cold Spring Harbor Laboratory Press, and Current Protocols in Molecular Biology, Ausubel et al. eds., John Wiley & Sons, 1994. In one embodiment, the vector is a DNA plasmid, such as a CMV/R plasmid such as CMV/R or CMV/R 8 κB (also referred to herein as CMV/R 8 kb). Examples of CMV/R and CMV/R 8 kb are provided herein. CMV/R is also described in U.S. Pat. No. 7,094,598 B2, issued Aug. 22, 2006. It is to be appreciated that an immunogen can comprise one nucleic acid construct or more than one nucleic acid construct.

[0067] As used herein, a nucleic acid molecule comprises a nucleic acid sequence that encodes a hemagglutinin antigen. A nucleic acid molecule can be produced recombinantly, synthetically, or by a combination of recombinant and synthetic procedures. A nucleic acid molecule of the disclosure can have a wild-type nucleic acid sequence or a codon-modified nucleic acid sequence to, for example, incorporate codons better recognized by the human translation system. In one embodiment, a nucleic acid molecule can be genetically-engineered to introduce codons encoding different amino acids, such as to introduce codons that encode an N-linked glycosylation site. Methods to produce nucleic acid molecules of the disclosure are known in the art, particularly once the nucleic acid sequence is know. A nucleic acid molecule of the present disclosure does not include an entire influenza virus genome. It is to be appreciated that a nucleic acid construct can comprise one nucleic acid molecule or more than one nucleic acid molecule. It is also to be appreciated that a nucleic acid molecule can encode one protein or more than one protein.

[0068] One embodiment of the disclosure is a nucleic acid molecule that encodes a protein comprising an influenza A subtype H1 hemagglutinin glycan-shielded receptor binding domain A (RBD-A) region and at least one influenza A subtype H1 hemagglutinin antigenic site, wherein said antigenic site is not within the RBD-A region, wherein the antigenic site elicits the production of neutralizing antibodies against an antigenic site of a pandemic influenza A subtype H1 HA, and wherein the glycan-shielded RBD-A region is homologous to the RBD-A region of the pandemic influenza A subtype H1 HA, with the exception that that glycan-shielded RBD-A region comprises at least one N-linked glycosylation site and the pandemic RBD-A region lacks any N-glycosylation sites. In one embodiment, the nucleic acid molecule encodes an influenza A subtype H1 HA1 region. In one embodiment, the nucleic acid molecule encodes the globular head of an influenza A subtype H1 hemagglutinin protein. In one embodiment, the nucleic acid molecule encodes a full-length influenza A subtype H1 hemagglutinin protein or a mature version thereof.

[0069] In one embodiment, the glycan-shielded RBD-A region of the protein comprises an RBD-A region of an influenza A subtype H1 HA that has an N-linked glycosylation site within the RBD-A region. In one embodiment such glycan-shielded RBD-A region elicits an immune response in which neutralizing antibodies are directed against an antigenic site within HA that is not within the RBD-A region. In one embodiment, an immunogen encodes a protein, the RBD-A region of which comprises a glycan-shielded RBD-A region of at least one of the following HAs: SEQ ID NO:27, SEQ ID NO:31, SEQ ID NO:35, SEQ ID NO:39, SEQ ID NO:43, and SEQ ID NO:47. For reference:

| | | Short |
|---|---|---|
| SEQ ID NO | Hemagglutinin antigen (HA) | name |
| SEQ ID NO: | A/California/04/2009 (H1N1) HA/h BlueH | 2009 CA |
| 27 | w/N-linked glycosylation sites at AA 142 | [2G-142 + |
| | and AA 177 | 177] |
| SEQ ID NO: | A/South Carolina/1/1918 (H1N1) HA w/N- | 1918 SC |
| 31 | linked glycosylation sites at AA 142 and | [2G-142 + |
| | AA 177 | 177] |
| SEQ ID NO: | A/California/04/2009 (H1N1) HA/h BlueH | 2009 CA |
| 35 | w/N-linked glycosylation site at AA 142 | [1G-142] |
| SEQ ID NO: | A/California/04/2009 (H1N1) HA/h BlueH | 2009 CA |
| 39 | w/N-linked glycosylation site at AA 177 | [1G-177] |
| SEQ ID NO: | A/South Carolina/1/1918 (H1N1) HA w/N- | 1918 SC |
| 43 | linked glycosylation site at AA 142 | [1G-142] |
| SEQ ID NO: | A/South Carolina/1/1918 (H1N1) HA w/N- | 1918 SC |
| 47 | linked glycosylation site at AA 177 | [1G-177] |

It is to be noted that the phrase “w/N-linked glycosylation site” means that an N-linked glycosylation site has been genetically engineered (at the DNA level) into the respective HA. For example, “A/California/04/2009 (H1N1) HA/h BlueH w/ N-linked glycosylation sites at AA 142 and AA 177” means an influenza A/California/04/2009 (H1N1) HA/h BlueH genetically engineered to include the 3-amino acid N-glycosylation site motif from amino acids 142-144 and 177-179 (1918 numbering). A short hand notation for this HA is 2009 CA [2G-142+177].

[0070] In one embodiment, the protein comprises an HA1 polypeptide of an influenza A subtype H1 HA. In one embodiment, the protein comprises an HA1 polypeptide of an HA having an amino acid sequence selected from the group consisting of SEQ ID NO:27, SEQ ID NO:31, SEQ ID NO:35, SEQ ID NO:39, SEQ ID NO:43, and SEQ ID NO:47.

[0071] In one embodiment, the protein comprises a globular head of an influenza A subtype H1 HA. In one embodiment, the protein comprises a globular head of an HA having an amino acid sequence selected from the group consisting of SEQ ID NO:27, SEQ ID NO:31, SEQ ID NO:35, SEQ ID NO:39, SEQ ID NO:43, and SEQ ID NO:47.

[0072] In one embodiment, the protein comprises an influenza A subtype H1 HA having an amino acid sequence selected from the group consisting of SEQ ID NO:27, SEQ ID NO:31, SEQ ID NO:35, SEQ ID NO:39, SEQ ID NO:43, and SEQ ID NO:47. In one embodiment, the protein comprises amino acid sequence SEQ ID NO:27 or SEQ ID NO:31.

[0073] In one embodiment, the protein comprises a glycan-shielded RBD-A region comprising at least one of the following regions: (a) amino acids 131-143 from SEQ ID NO:27 or SEQ ID NO:31; (b) amino acids 170-182 from SEQ ID NO:27 or SEQ ID NO:31; (c) amino acids 205-215 from SEQ ID NO:27 or SEQ ID NO:31; (d) amino acids 257-262 from SEQ ID NO:27 or SEQ ID NO:31; or (e) amino acids 131-146 from SEQ ID NO:27 or SEQ ID NO:31. In one embodiment, the protein comprises a glycan-shielded RBD-A region comprising: (a) amino acids 131-143 from SEQ ID NO:27 or SEQ ID NO:31; (b) amino acids 170-182 from SEQ ID NO:27 or SEQ ID NO:31; (c) amino acids 205-215 from SEQ ID NO:27 or SEQ ID NO:31; and (d) amino acids 257-262 from SEQ ID NO:27 or SEQ ID NO:31. In one embodiment, the protein comprises a glycan-shielded RBD-A region comprising (a) amino acids 131-143 from SEQ ID NO:27; (b) amino acids 170-182 from SEQ ID NO:27; (c) amino acids 205-215 from SEQ ID NO:27; and (d) amino acids 257-262 from SEQ ID NO:27. In one embodiment, the protein comprises a glycan-shielded RBD-A region comprising (a) amino acids 131-143 from SEQ ID NO:31; (b) amino acids 170-182 from SEQ ID NO:31; (c) amino acids 205-215 from SEQ ID NO:31; and (d) amino acids 257-262 from SEQ ID NO:31.

[0074] In one embodiment, the nucleic acid construct comprises a DNA plasmid that is operatively linked to a nucleic acid molecule encoding at least one of the proteins disclosed herein, such that the nucleic acid molecule expresses the protein. In one embodiment, the DNA plasmid comprises a CMV plasmid, such as CMV/R or CMV/R 8 kb. In one embodiment, the nucleic acid construct comprises a CMV/R plasmid operatively linked to a nucleic acid molecule encoding such protein. In one embodiment, the nucleic acid construct comprises a CMV/R 8 kb plasmid operatively linked to a nucleic acid molecule encoding such protein.

[0075] One embodiment is an immunogen comprising a nucleic acid construct having nucleic acid sequence SEQ ID NO:25 (VRC 9446), SEQ ID NO:29 (VRC 9449), SEQ ID NO:33 (VRC 9444), SEQ ID NO:37 (VRC 9445), SEQ ID NO:41 (VRC 9447), or SEQ ID NO:45 (VRC 9448).

[0076] Another embodiment of the disclosure is a glycan-shielded immunogen comprising a protein that comprises an influenza A subtype H1 hemagglutinin glycan-shielded receptor binding domain A (RBD-A) region and at least one influenza A subtype H1 hemagglutinin antigenic site, wherein the antigenic site is not within the RBD-A region, wherein the antigenic site elicits the production of neutralizing antibodies against an antigenic site of a pandemic influenza A subtype H1 HA, and wherein the glycan-shielded RBD-A region is homologous to the RBD-A region of the pandemic influenza A subtype H1 HA, with the exception that that glycan-shielded RBD-A region comprises at least one N-linked glycosylation site and the pandemic RBD-A region lacks any N-glycosylation sites. It is to be appreciated that such a protein can comprise any of the proteins described above as being encoded by the nucleic acid molecules of those embodiments.

[0077] The present disclosure also provides antibodies that neutralize influenza A subtype H1 antigenic sites of HA. Such antibodies are produced by administering a glycan-shielded immunogen as disclosed herein to an animal and harvesting immune sera or monoclonal antibodies, using techniques known to those skilled in the art. As such, the antibodies can be polyclonal or monoclonal. Such antibodies have utility against pandemic, evolving and seasonal influenza A subtype H1 viruses.

[0078] The present disclosure also provides compositions that comprise a glycan-shielded immunogen as disclosed herein. One embodiment is a composition comprising an immunogen comprising a nucleic acid construct as described above. Another embodiment is a composition comprising a protein as described above. Another embodiment is a composition comprising a glycan-shielded immunogen and another influenza vaccine that protects against influenza virus, such as, but not limited to, a nucleic acid immunogen, a protein immunogen, a subunit immunogen, an inactivated virus immunogen, a subvirion immunogen, or an attenuated virus immunogen. Such a vaccine can be monovalent or multivalent.

[0079] Non-limiting examples of such compositions include the following: In one embodiment, the composition comprises (a) an immunogen comprising a nucleic acid construct comprising a nucleic acid molecule encoding an influenza A subtype H1 hemagglutinin glycan-shielded receptor binding domain A (RBD-A) region and at least one influenza A subtype H1 hemagglutinin antigenic site as disclosed herein and (b) a pandemic influenza A hemagglutinin protein or a nucleic acid molecule encoding a pandemic influenza A hemagglutinin protein. In one embodiment, the composition comprises (a) an immunogen comprising a nucleic acid construct comprising a nucleic acid molecule encoding an influenza A subtype H1 hemagglutinin glycan-shielded receptor binding domain A (RBD-A) region and at least one influenza A subtype H1 hemagglutinin antigenic site as disclosed herein and (b) nucleic acid construct VRC 9328 that encodes A/California/04/2009 (H1N1) HA. In one embodiment the composition comprises (a) an immunogen comprising a nucleic acid construct comprising a nucleic acid molecule encoding an influenza A subtype H1 hemagglutinin glycan-shielded receptor binding domain A (RBD-A) region and at least one influenza A subtype H1 hemagglutinin antigenic site as disclosed herein and (b) an immunogen comprising at least one nucleic acid molecule encoding at least one influenza hemagglutinin antigen (HA) selected from the group consisting of influenza A group 1 HA, influenza A group 2 HA, influenza B group HA, and influenza C group HA. In one embodiment, the composition comprises (a) an immunogen comprising a nucleic acid construct comprising a nucleic acid molecule encoding an influenza A subtype H1 hemagglutinin glycan-shielded receptor binding domain A (RBD-A) region and at least one influenza A subtype H1 hemagglutinin antigenic site as disclosed herein and (b) an immunogen comprising at least one hemagglutinin antigen (HA) selected from the group consisting of influenza A group 1 HA, influenza A group 2 HA, influenza B group HA, and influenza C group HA. In one embodiment, the composition comprises (a) an immunogen comprising a nucleic acid construct comprising a nucleic acid molecule encoding an influenza A subtype H1 hemagglutinin glycan-shielded receptor binding domain A (RBD-A) region and at least one influenza A subtype H1 hemagglutinin antigenic site as disclosed herein, (b) a pandemic influenza A hemagglutinin protein or a nucleic acid molecule encoding a pandemic influenza A hemagglutinin protein, and (c) a seasonal influenza vaccine.

[0080] As used herein, a seasonal influenza vaccine refers to a vaccine that is developed for a flu season as described herein. Typically, a seasonal influenza vaccine includes a group 1 influenza A strain, a group 2 influenza A strain, and an influenza B strain. Group 1 influenza A strains include those strains having a H1, H2, H5, H7 or H9 HA subtype. Group 2 influenza A strains include those strains having a H3, H4, H6, H8, H10, H11, H12, H13, H14, H15 or H16 HA subtype. For example, the 2006-2007 influenza virus vaccine includes HA from A/New Caledonia/20/1999 (H1N1), A/Wisconsin/67/2005 (H3N2) and B/Malaysia/256/2004; the 2007-2008 influenza virus vaccine includes HA from A/Solomon Islands/3/2006 (H1N1), A/Wisconsin/67/2005 (H3N2) and B/Malaysia/2506/2004); the 2008-2009 seasonal influenza vaccine includes HA from A/Brisbane/59/2007 (H1N1); A/Brisbane/10/2007 (H3N2) and B/Florida/4/2006; and the 2009-2010 seasonal influenza vaccine includes HA from a A/Brisbane/59/2007 (H1N1)-like virus, a A/Brisbane/10/2007 (H3N2)-like virus, and a B/Brisbane/60/2008-like virus.

[0081] The present disclosure also provides proteins comprising a glycan-shielded RBD-A region. Such proteins are produced by genetically-engineering one or more N-linked glycosylation sites into an RBD-A region of a hemagglutinin antigen from a pandemic influenza A subtype H1 virus. One embodiment is a protein comprising at least a portion of a hemagglutinin antigen having an amino acid sequence selected from the group consisting of SEQ ID NO:27, SEQ ID NO:31, SEQ ID NO:35, SEQ ID NO:39, SEQ ID NO:43, and SEQ ID NO:47. Such portion can comprise at least one of the following regions: (a) amino acids 131-143 from SEQ ID NO:27 or SEQ ID NO:31; (b) amino acids 170-182 from SEQ ID NO:27 or SEQ ID NO:31; (c) amino acids 205-215 from SEQ ID NO:27 or SEQ ID NO:31; (d) amino acids 257-262 from SEQ ID NO:27 or SEQ ID NO:31; or (e) amino acids 131-146 from SEQ ID NO:27 or SEQ ID NO:31. In one embodiment, such portion can comprise (a) amino acids 131-143 from SEQ ID NO:27; (b) amino acids 170-182 from SEQ ID NO:27; (c) amino acids 205-215 from SEQ ID NO:27; and (d) amino acids 257-262 from SEQ ID NO:27. In one embodiment, such portion can comprise (a) amino acids 131-143 from SEQ ID NO:31; (b) amino acids 170-182 from SEQ ID NO:31; (c) amino acids 205-215 from SEQ ID NO:31; and (d) amino acids 257-262 from SEQ ID NO:31. One embodiment is a protein that comprises a HA1 polypeptide from a hemagglutinin antigen comprising SEQ ID NO:27, SEQ ID NO:31, SEQ ID NO:35, SEQ ID NO:39, SEQ ID NO:43, and SEQ ID NO:47. One embodiment is a protein that comprises a receptor binding domain from a hemagglutinin antigen comprising SEQ ID NO:27, SEQ ID NO:31, SEQ ID NO:35, SEQ ID NO:39, SEQ ID NO:43, and SEQ ID NO:47. One embodiment is a protein that comprises a RBD-A region from a hemagglutinin antigen comprising SEQ ID NO:27, SEQ ID NO:31, SEQ ID NO:35, SEQ ID NO:39, SEQ ID NO:43, and SEQ ID NO:47. In one embodiment, the RBD-A region is from a hemagglutinin antigen comprising SEQ ID NO:27. In one embodiment, the RBD-A region is from a hemagglutinin antigen comprising SEQ ID NO:31. One embodiment is a protein comprising SEQ ID NO:27, SEQ ID NO:31, SEQ ID NO:35, SEQ ID NO:39, SEQ ID NO:43, and SEQ ID NO:47. One embodiment is a protein comprising SEQ ID NO:27. One embodiment is a protein comprising SEQ ID NO:31. The present disclosure also provides a nucleic acid molecule encoding any of these proteins. Now that these proteins have been described, for example by their amino acid sequences, one skilled in the art can produce such proteins and nucleic acid molecules. Such proteins can be produced by recombinant DNA technology or by chemical synthesis. One skilled in the art can also take the RBD-A regions of hemagglutinin antigens from other pandemic influenza A subtype H1 viruses and produce glycan-shielded RBD-A regions therefrom.

[0082] The present disclosure provides a method to elicit a neutralizing antibody immune response against an influenza A subtype H1 virus in a subject comprising administering to the subject an immunogen or composition comprising a nucleic acid construct comprising a nucleic acid molecule that encodes a protein comprising an influenza A subtype hemagglutinin glycan-shielded receptor binding domain A (RBD-A) region and at least one influenza A subtype H1 hemagglutinin antigenic site, wherein said antigenic site is not within the RBD-A region, wherein the antigenic site elicits the production of neutralizing antibodies against an antigenic site of a pandemic influenza A subtype H1 HA, and wherein the glycan-shielded RBD-A region is homologous to the RBD-A region of the pandemic influenza A subtype H1 HA, with the exception that that glycan-shielded RBD-A region comprises at least one N-linked glycosylation site and the pandemic RBD-A region lacks any N-glycosylation sites. Examples of suitable immunogens and compositions are disclosed herein. In one embodiment, such immunogens or compositions elicit antibodies that neutralize a pandemic influenza A subtype H1 virus. In one embodiment, such immunogens or compositions elicit antibodies that neutralize an evolving influenza A subtype H1 virus. An evolving influenza virus is a virus that is mutating to evade the immune response generated by a pandemic influenza virus. In one embodiment the evolving virus has acquired an N-linked glycosylation site in the RBD-A region. In one embodiment, such immunogens or compositions elicit antibodies that neutralize a seasonal influenza A subtype H1 virus. One embodiment is a method to protect a subject from influenza A subtype H1 infection comprising administering to the subject any of such immunogens or compositions. Such protection can be either therapeutic (i.e., to treat an influenza virus infection) or prophylactic (i.e., to protect a subject from disease caused by influenza virus or to prevent or reduce infection by influenza virus). Depending on the nature of the immunogens or compositions, protection against other influenza virus types, groups and/or subtypes can also be achieved.

[0083] The present disclosure also includes administering a protein comprising an influenza A subtype H1 hemagglutinin glycan-shielded receptor binding domain A (RBD-A) region and at least one influenza A subtype H1 hemagglutinin antigenic site, wherein said antigenic site is not within the RBD-A region, wherein the antigenic site elicits the production of neutralizing antibodies against an antigenic site of a pandemic influenza A subtype H1 HA, and wherein the glycan-shielded RBD-A region is homologous to the RBD-A region of the pandemic influenza A subtype H1 HA, with the exception that that glycan-shielded RBD-A region comprises at least one N-linked glycosylation site and the pandemic RBD-A region lacks any N-glycosylation sites, or a composition comprising such a protein. Such proteins can elicit the production of neutralizing antibodies against pandemic, evolving or seasonal influenza virus as described above. Such proteins can protect a subject from influenza as described above. A composition comprising antibodies that neutralize against such antigenic sites can also be administered. Such antibodies can protect a subject from influenza as described above.

[0084] As used herein, a subject refers to any human or other animal susceptible to influenza infection. Examples include, but are not limited to, humans and other primates, including non-human primates such as chimpanzees and other apes and monkey species; farm animals such as cattle, sheep, pigs, goats and horses; domestic mammals such as dogs and cats; laboratory animals including rodents such as mice, rats and guinea pigs; birds, including domestic, wild and game birds such as chickens, turkeys and other gallinaceous birds, ducks, geese, and the like. The term does not denote a particular age. Thus, both adult and newborn individuals are included. An infected subject is a subject that has been exposed to an influenza virus that causes a natural immune response in the subject. A vaccinated subject is a subject that has been administered an immunogen or vaccine that is intended to provide a protective effect against an influenza virus.

### Cross-Protective Pandemic Immunogens

[0085] The present disclosure provides immunogens against pandemic influenza A subtype H1 viruses that can elicit an immune response not only against the homologous pandemic influenza A subtype H1 virus strain but also against heterologous pandemic influenza A subtype H1 virus strains. These immunogens either encode a protein comprising a non-glycosylated receptor binding domain A (RBD-A) region of a pandemic influenza A subtype H1 hemagglutinin antigen or comprise such a protein. Due to their ability to protect against homologous and heterologous pandemic influenza A subtype strains, even those that appeared in the human population more than 90 years apart, such immunogens are referred to herein as cross-protective pandemic immunogens.

[0086] One embodiment of the disclosure is an immunogen comprising a nucleic acid construct comprising a nucleic acid molecule that encodes an immunogenic protein comprising at least one epitope of the receptor binding domain A (RBD-A) region of a pandemic influenza A subtype H1 hemagglutinin antigen, wherein the encoded RBD-A region is lacking any N-linked glycosylation site that is present in the RBD-A region of a non-pandemic influenza A subtype H1 hemagglutinin antigen, wherein the immunogenic protein can elicit a neutralizing antibody immune response against a homologous pandemic influenza A subtype H1 virus strain and against a heterologous pandemic influenza A subtype H1 virus strain. The terms immunogen, nucleic acid construct, nucleic acid molecule, RBD-A region, hemagglutinin antigen, pandemic influenza virus, N-linked glycosylation site, neutralizing antibody immune response, homologous strain and heterologous strain have been described elsewhere herein. As used herein, an epitope of a RBD-A region is a three-dimensional amino acid structure that can elicit a neutralizing antibody response against the non-glycosylated RBD-A region of a pandemic influenza A subtype H1 virus. Such epitope can be located entirely within a RBD-A region or can be located partly in a RBD-A region and partly in a nearby region of the globular head of an influenza A subtype H1 hemagglutinin protein.

[0087] The pandemic influenza A subtype H1 hemagglutinin antigen can be any pandemic influenza A subtype H1 hemagglutinin antigen, hemagglutinin antigens from known pandemic strains and from strains that will emerge over time, either through viral strain evolution or from non-human animal reservoirs, such as, but not limited to swine. In one embodiment, the pandemic influenza A subtype H1 hemagglutinin antigen is an H1 HA from a 1918, 1976, or 2009 pandemic influenza A subtype H1 strain. Examples of such pandemic influenza A subtype H1 hemagglutinin antigens include, but are not limited to: A/California/04/2009 (H1N1) HA, A/South Carolina/1/1918 (H1N1) HA, A/Ancona/05/2009, A/California/07/2009 (H1N1) HA, A/Canada-MB/RV2013/2009 (H1N1) HA, A Japan/1070/2009 (H1N1) HA, A/Mexicao/InDRE4114/2009 (H1N1) HA, A/Nanjing/1/2009 (H1N1) HA, A/New York/18/2009 (H1N1) HA, A/Paris/2722/2009 (H1N1) HA, A/Perth/29/2009 (H1N1) HA, A/Sao Paulo/43812/2009 (H1N1) HA, A/Stockholm/31/2009 (H1N1) HA, A/Texas/05/2009 (H1N1) HA, A/New Jersey/1976 (H1N1) HA, A/New Jersey/8/1976 (H1N1) HA, and A/New Jersey/11/1976 (H1N1) HA. In one embodiment, the pandemic influenza A subtype H1 hemagglutinin antigen is A/California/04/2009 (H1N1) HA or A/South Carolina/1/1918 (H1N1) HA. In one embodiment, the antigen is A/California/04/2009 (H1N1) HA. In one embodiment, the antigen is A/South Carolina/1/1918 (H1N1) HA.

[0088] One embodiment of the disclosure is an immunogenic protein that comprises at least one epitope of a RBD-A region that lacks any N-linked glycosylation site that is present in the RBD-A region of a non-pandemic influenza A subtype H1 hemagglutinin antigen. Such an N-linked glycosylation site can be any N-linked glycosylation site of a RBD-A region of a non-pandemic influenza A subtype H1 virus. An N-linked glycosylation site can be, but need not be, selected from at least one of the following: (a) an N-linked glycosylation site corresponding to amino acid position 142 of SEQ ID NO:3; (b) an N-linked glycosylation site corresponding to amino acid position 144 of SEQ ID NO:3; (c) an N-linked glycosylation site corresponding to amino acid position 172 of SEQ ID NO:3; (d) an N-linked glycosylation site corresponding to amino acid position 177 of SEQ ID NO:3; (e) an N-linked glycosylation site corresponding to amino acid position 179 of SEQ ID NO:3; and (f) an N-linked glycosylation site corresponding to amino acid position 136 of SEQ ID NO:3. As noted above, the term N-linked glycosylation site refers to the asparagine attachment site, even though the respective RBD-A region has the entire three-amino acid motif. It is also to be appreciated that SEQ ID NO:3 does not include any glycosylation sites in the RBD-A motif because that amino acid sequence represents the hemagglutinin protein of a pandemic strain; this SEQ ID NO is used simply for reference (i.e., 1918 numbering). In addition, the cited amino acid positions represent those in a full-length hemagglutinin protein although a hemagglutinin antigen of the disclosure need not comprise a full-length hemagglutinin protein.

[0089] In one embodiment, the immunogenic protein comprises at least one of the following regions: (a) amino acids 131-143 from SEQ ID NO:3 or SEQ ID NO:62; (b) amino acids 170-182 from SEQ ID NO:3 or SEQ ID NO:62; or (c) amino acids 131-146 from SEQ ID NO:3 or SEQ ID NO:62. In one embodiment, the immunogenic protein comprises (a) amino acids 131-143 from SEQ ID NO:3 or SEQ ID NO:62; (b) amino acids 170-182 from SEQ ID NO:3 or SEQ ID NO:62; (c) amino acids 205-215 from SEQ ID NO:3 or SEQ ID NO:62; and (d) amino acids 257-262 from SEQ ID NO:3 or SEQ ID NO:62. In one embodiment, the immunogenic protein comprises (a) amino acids 131-143 from SEQ ID NO:3; (b) amino acids 170-182 from SEQ ID NO:3; (c) amino acids 205-215 from SEQ ID NO:3; and (d) amino acids 257-262 from SEQ ID NO:3. In one embodiment, the immunogenic protein comprises (a) amino acids 131-143 from SEQ ID NO:62; (b) amino acids 170-182 from SEQ ID NO:62; (c) amino acids 205-215 from SEQ ID NO:62; and (d) amino acids 257-262 from SEQ ID NO:62.

[0090] In one embodiment, the immunogenic protein comprises at least one epitope from the RBD-A region of a hemagglutinin antigen comprising an amino acid sequence selected from the group consisting of SEQ ID NO:3, SEQ ID NO:7, SEQ ID NO:19, SEQ ID NO:49, SEQ ID NO:51, SEQ ID NO:52, SEQ ID NO:53, SEQ ID NO:54, SEQ ID NO:55, SEQ ID NO:56, SEQ ID NO:57, SEQ ID NO:58, SEQ ID NO:59, SEQ ID NO:60, SEQ JD NO:61, and SEQ ID NO:62. In one embodiment, the immunogenic protein comprises at least one epitope from the RBD-A region of a hemagglutinin antigen comprising an amino acid sequence selected from the group consisting of SEQ ID NO:3, SEQ ID NO:7, SEQ ID NO:19, SEQ ID NO:49, and SEQ ID NO:62. In one embodiment, the immunogenic protein comprises at least one epitope from the RBD-A region of a hemagglutinin antigen comprising amino acid sequence SEQ ID NO:3. In one embodiment, the immunogenic protein comprises at least one epitope from the RBD-A region of a hemagglutinin antigen comprising amino acid sequence SEQ ID NO:62.

[0091] In one embodiment, the immunogenic protein comprises the RBD-A region of a hemagglutinin antigen comprising an amino acid sequence selected from the group consisting of SEQ ID NO:3, SEQ ID NO:7, SEQ ID NO:19, SEQ ID NO:49, SEQ ID NO:51, SEQ ID NO:52, SEQ ID NO:53, SEQ ID NO:54, SEQ ID NO:55, SEQ ID NO:56, SEQ ID NO:57, SEQ ID NO:58, SEQ ID NO:59, SEQ ID NO:60, SEQ ID NO:61, and SEQ ID NO:62. In one embodiment, the immunogenic protein comprises the receptor binding domain of a hemagglutinin antigen comprising an amino acid sequence selected from the group consisting of SEQ ID NO:3, SEQ ID NO:7, SEQ ID NO:19, SEQ ID NO:49, SEQ ID NO:51, SEQ ID NO:52, SEQ ID NO:53, SEQ ID NO:54, SEQ ID NO:55, SEQ ID NO:56, SEQ ID NO:57, SEQ ID NO:58, SEQ ID NO:59, SEQ ID NO:60, SEQ ID NO:61, and SEQ ID NO:62. In one embodiment, the immunogenic protein comprises the HA1 polypeptide of a hemagglutinin antigen comprising an amino acid sequence selected from the group consisting of SEQ ID NO:3, SEQ ID NO:7, SEQ ID NO:19, SEQ ID NO:49, SEQ ID NO:51, SEQ ID NO:52, SEQ ID NO:53, SEQ ID NO:54, SEQ ID NO:55, SEQ ID NO:56, SEQ ID NO:57, SEQ ID NO:58, SEQ ID NO:59, SEQ ID NO:60, SEQ ID NO:61, and SEQ ID NO:62. In one embodiment, the immunogenic protein comprises a hemagglutinin antigen comprising an amino acid sequence selected from the group consisting of SEQ ID NO:3, SEQ ID NO:7, SEQ ID NO:19, SEQ ID NO:49, SEQ ID NO:51, SEQ ID NO:52, SEQ ID NO:53, SEQ ID NO:54, SEQ ID NO:55, SEQ ID NO:56, SEQ ID NO:57, SEQ ID NO:58, SEQ ID NO:59, SEQ ID NO:60, SEQ ID NO:61, and SEQ ID NO:62. In one embodiment, the immunogenic protein comprises a hemagglutinin antigen comprising an amino acid sequence selected from the group consisting of SEQ ID NO:3, SEQ ID NO:7, SEQ ID NO:19, SEQ ID NO:49, and SEQ ID NO:62. In one embodiment, the immunogenic protein comprises a hemagglutinin antigen comprising amino acid sequence SEQ ID NO:3. In one embodiment, the immunogenic protein comprises a hemagglutinin antigen comprising amino acid sequence SEQ ID NO:62.

[0092] In one embodiment, the immunogenic protein comprises a hemagglutinin antigen encoded by a nucleic acid molecule encoding a protein comprising an amino acid sequence selected from the group consisting of SEQ ID NO:3, SEQ ID NO:7, SEQ ID NO:19, SEQ ID NO:49, SEQ ID NO:51, SEQ ID NO:52, SEQ ID NO:53, SEQ ID NO:54, SEQ ID NO:55, SEQ ID NO:56, SEQ ID NO:57, SEQ ID NO:58, SEQ ID NO:59, SEQ ID NO:60, SEQ ID NO:61, and SEQ ID NO:62, or an epitope thereof.

[0093] In one embodiment the nucleic acid molecule encoding an immunogenic protein of the disclosure encodes a A/South Carolina/1/1918 (H1N1) HA or A/California/02/2009 (H1N1) HA. In one embodiment the nucleic acid molecule comprises at least one of the following nucleic acid sequences: SEQ ID NO:2, SEQ ID NO:6, SEQ ID NO:18, or SEQ ID NO:50. In one embodiment the nucleic acid molecule comprises SEQ ID NO:2. In one embodiment the nucleic acid molecule comprises SEQ ID NO:50.

[0094] In one embodiment, the nucleic acid construct comprises a DNA plasmid that is operatively linked to a nucleic acid molecule encoding at least one of the immunogenic proteins disclosed herein, such that the nucleic acid molecule expresses the protein. In one embodiment, the DNA plasmid comprises a CMV plasmid, such as CMV/R or CMV/R 8 kb. In one embodiment, the nucleic acid construct comprises a CMV/R plasmid operatively linked to a nucleic acid molecule encoding such immunogenic protein. In one embodiment, the nucleic acid construct comprises a CMV/R 8 kb plasmid operatively linked to a nucleic acid molecule encoding such immunogenic protein.

[0095] One embodiment is an immunogen comprising a nucleic acid construct having nucleic acid sequence SEQ ID NO:1 (VRC 7730), SEQ ID NO:5 (VRC 7733), SEQ ID NO:17 (VRC 7764), or SEQ ID NO:63 (VRC 9328). In one embodiment, the nucleic acid construct comprises VRC 9328.

[0096] Another embodiment of the disclosure is a cross-protective pandemic immunogen comprising an immunogenic protein comprising at least one epitope of the receptor binding domain A (RBD-A) region of a pandemic influenza A subtype H1 hemagglutinin antigen, wherein the encoded RBD-A region is lacking any N-linked glycosylation site that is present in the RBD-A region of a non-pandemic influenza A subtype H1 hemagglutinin antigen, wherein the immunogenic protein can elicit a neutralizing antibody immune response against a homologous pandemic influenza A subtype H1 virus strain and against a heterologous pandemic influenza A subtype H1 virus strain. It is to be appreciated that such a protein can comprise any of the immunogenic proteins described above as being encoded by the nucleic acid molecules of those embodiments.

[0097] The present disclosure also provides antibodies that neutralize non-glycosylated influenza A subtype H1 RBD-A regions. Such antibodies are produced by administering an immunogenic protein as disclosed herein to an animal and harvesting immune sera or monoclonal antibodies, using techniques known to those skilled in the art. As such, the antibodies can be polyclonal or monoclonal. Such antibodies have utility against pandemic influenza A subtype H1 viruses.

[0098] The present disclosure also provides compositions that comprise a cross-protective pandemic immunogen as disclosed herein. Non-limiting examples of such compositions include the following: One embodiment is a composition comprising an immunogen comprising a nucleic acid construct encoding an immunogenic protein as described above. Another embodiment is a composition comprising an immunogenic protein as described above. Another embodiment is a composition comprising a cross-protective pandemic immunogen and another influenza vaccine that protects against influenza virus, such as, but not limited to, a nucleic acid immunogen, a protein immunogen, a subunit immunogen, an inactivated virus immunogen, a subvirion immunogen, or an attenuated virus immunogen. Such a vaccine can be monovalent or multivalent.

In one embodiment, the composition comprises (a) an immunogen comprising a nucleic acid construct comprising a nucleic acid molecule encoding an immunogenic protein as disclosed herein and (b) an immunogen comprising at least one nucleic acid molecule encoding at least one influenza hemagglutinin antigen (HA) selected from the group consisting of influenza A group 1 HA, influenza A group 2 HA, influenza B group HA, and influenza C group HA. In one embodiment, the composition comprises (a) an immunogen comprising a nucleic acid construct comprising a nucleic acid molecule encoding an immunogenic protein as disclosed herein and (b) an immunogen comprising at least one hemagglutinin antigen (HA) selected from the group consisting of influenza A group 1 HA, influenza A group 2 HA, influenza B group HA, and influenza C group HA. In one embodiment, the composition comprises (a) an immunogen comprising a nucleic acid construct comprising a nucleic acid molecule encoding an immunogenic protein as disclosed herein, and (b) a seasonal influenza vaccine. In one embodiment, the composition comprises (a) an immunogen comprising a nucleic acid construct comprising a nucleic acid molecule encoding an immunogenic protein as disclosed herein, and (b) an immunogen comprising a nucleic acid construct comprising a nucleic acid molecule encoding an influenza A subtype H1 hemagglutinin glycan-shielded receptor binding domain A (RBD-A) region and at least one influenza A subtype H1 hemagglutinin antigenic site as disclosed herein. In one embodiment, the composition comprises (a) an immunogen comprising a nucleic acid construct comprising a nucleic acid molecule encoding an immunogenic protein as disclosed herein, (b) an immunogen comprising a nucleic acid construct comprising a nucleic acid molecule encoding an influenza A subtype H1 hemagglutinin glycan-shielded receptor binding domain A (RBD-A) region and at least one influenza A subtype H1 hemagglutinin antigenic site as disclosed herein, and (c) a seasonal influenza vaccine.

[0099] The present disclosure provides a method to elicit a neutralizing antibody immune response against an influenza A subtype H1 virus in a subject comprising administering to the subject an immunogen or composition comprising a nucleic acid construct comprising a nucleic acid molecule that encodes an immunogenic protein comprising at least one epitope of the receptor binding domain A (RBD-A) region of a pandemic influenza A subtype H1 hemagglutinin antigen, wherein the encoded RBD-A region is lacking any N-linked glycosylation site that is present in the RBD-A region of a non-pandemic influenza A subtype H1 hemagglutinin antigen, wherein the immunogenic protein can elicit a neutralizing antibody immune response against a homologous pandemic influenza A subtype H1 virus strain and against a heterologous pandemic influenza A subtype H1 virus strain. Examples of suitable immunogens encoding an immunogenic protein and compositions comprising such immunogens are disclosed herein. In one embodiment, such immunogens or compositions elicit a neutralizing antibody immune response against a pandemic influenza A subtype H1 virus.

[0100] One embodiment is a method to protect a subject from an influenza A subtype H1 virus, such as a pandemic influenza A subtype H1 virus, by administering to the subject any of the immunogens or compositions comprising a nucleic acid construct comprising a nucleic acid molecule encoding an immunogenic protein of the disclosure. Such protection can be either therapeutic (i.e., to treat an influenza virus infection) or prophylactic (i.e., to protect a subject from disease caused by influenza virus or to prevent or reduce infection by influenza virus). Depending on the nature of the immunogens or compositions, protection against other influenza virus types, groups and/or subtypes can also be achieved.

[0101] One embodiment is a method to reduce pandemic influenza A subtype H1 virus in an animal reservoir comprising administering to animals in the reservoir any of the immunogens or compositions comprising a nucleic acid construct comprising a nucleic acid molecule encoding an immunogenic protein of the disclosure. As used herein, an animal reservoir is a species, genus, class or family of animals that harbors influenza A subtype H1 viruses that, when they infect humans, lead to pandemic outbreaks of influenza. A non-limiting example of such animals are swine. In one embodiment the virus in the animal reservoir is reduced to a level such that it is not transmitted to humans. In one embodiment, the virus in the animal reservoir is eradicated.

[0102] The present disclosure also provides a method to elicit a neutralizing antibody immune response against a pandemic influenza A subtype H1 virus comprising administering to a subject an immunogen comprising a nucleic acid molecule encoding a pandemic influenza A subtype H1 hemagglutinin antigen (HA), wherein the HA is heterologous to the virus against which an immune response is being elicited, wherein the immunogen elicits the immune response in the patient. In one embodiment, the hemagglutinin antigen lacks any N-linked glycosylation site that is present in the receptor binding domain A (RBD-A) region of a hemagglutinin antigen from a non-pandemic influenza A virus. In one embodiment, the hemagglutinin antigen can be any of the immunogenic proteins disclosed herein. In one embodiment, the method protects the subject against pandemic influenza A subtype H1 virus.

[0103] The present disclosure also includes administering a cross-protective pandemic immunogen comprising any of the immunogenic proteins of the embodiments. Such an immunogen will elicit a neutralizing antibody immune response against a pandemic influenza A subtype H1 virus. Compositions of such an immunogenic protein with other immunogens, such as those disclosed herein, also have the potential of eliciting neutralizing antibody immune responses against other influenza virus as well as against a pandemic influenza A subtype H1 virus.

### VRC 9328

[0104] The present disclosure provides an immunogen comprising nucleic acid construct VRC 9328. VRC-9328, the map of which is depicted in FIG. 16, is a CMV/R plasmid that encodes Influenza A/California/04/2009 (H1N1) HA; the BlueH designates the manufacturer of the nucleic acid construct. VRC 9328 elicits a neutralizing antibody immune response against pandemic influenza A subtype H1 strains, including A/South Carolina/1/1918 (H1N1) and A/California/04/2009 (H1N1).

[0105] The present disclosure also provides compositions that comprise VRC 9328. Non-limiting examples of such compositions include the following: One embodiment is a composition that comprises VRC 9328 and an immunogen comprising at least one hemagglutinin antigen (HA) selected from the group consisting of influenza A group 1 HA, influenza A group 2 HA, influenza B group HA, and influenza C group HA. One embodiment is a composition that comprises VRC 9328 and a seasonal influenza vaccine. One embodiment is a composition that comprises VRC 9328 and an immunogen comprising a nucleic acid molecule encoding a pandemic H1 HA heterologous to influenza A/California/04/2009 (H1N1) HA. One embodiment is a composition that comprises VRC 9328, a seasonal influenza vaccine, and an immunogen comprising a nucleic acid construct comprising a nucleic acid molecule encoding an influenza A subtype H1 hemagglutinin glycan-shielded receptor binding domain A (RBD-A) region and at least one influenza A subtype H1 hemagglutinin antigenic site as disclosed herein.

[0106] The present disclosure also provides a method to elicit a neutralizing antibody immune response against an influenza A subtype H1 virus in a subject comprising administering to the subject any of the disclosed immunogens or compositions comprising VRC 9328. In one embodiment, the influenza A subtype H1 virus is a pandemic influenza A subtype H1 virus. In one embodiment, the influenza A subtype H1 virus is a homologous pandemic influenza A subtype H1 virus. In one embodiment, the influenza A subtype H1 virus is a heterologous pandemic influenza A subtype H1 virus.

### Administration Methods

[0107] Immunogens and compositions of the present disclosure can be administered to subjects using techniques known to those skilled in the art; see, for example, WO 2007/100584 A2, published Sep. 7, 2007; WO 2008/112017 A2, published Sep. 18, 2008, WO 2009/092038 A1, published Jul. 23, 2009, and WO 2010/036948, published Apr. 1, 2010, all of which are incorporated by reference herein in their entireties. Such immunogens and compositions can include an excipient, such as a pharmaceutically acceptable excipient. Such immunogens and compositions can also include a carrier or an adjuvant. Routes of administration can be determined by those skilled in the art. Doses can also be determined by those skilled in the art. Such immunogens and compositions can be administered once or several times. Such immunogens and compositions can be administered as a prime and then boosted with the same immunogens and compositions, or with other compositions, such as nucleic acid (e.g., adenoviral or retroviral vectors encoding influenza HAs, pseudotyped lentiviruses encoding influenza HAs), protein, subunit, subvirion, inactivated virus, attenuated virus, seasonal influenza vaccine, or other influenza vaccines.

### Method to Detect Emergence of Non-Pandemic Virus

[0108] The present disclosure also provides a method to detect the emergence of a non-pandemic influenza A subtype H1 virus from a pandemic population of influenza A subtype H1 virus, which method comprises (a) isolating a biological sample containing influenza A virus; and (b) testing the hemagglutinin antigen of said virus for the presence of N-linked glycans at positions corresponding to amino acids 136, 142, 144, 172, 177 and 179 of SEQ ID NO:3; wherein the presence of glycan at any of those positions indicates the emergence of a non-pandemic virus. The present disclosure also provides kits to enable such methods. Such a non-pandemic virus can be an evolving or seasonal influenza virus.

### EXAMPLES

[0109] The following examples are put forth so as to provide those of ordinary skill in the art with a complete disclosure and description of how to make and use the embodiments, and are not intended to limit the scope of what the inventors regard as their invention nor are they intended to represent that the experiments below are all or the only experiments performed. Efforts have been made to ensure accuracy with respect to numbers used (e.g. amounts, temperature, etc.) but some experimental errors and deviations should be accounted for. Unless indicated otherwise, parts are parts by weight, molecular weight is weight average molecular weight, and temperature is in degrees Celsius. Standard abbreviations are used.

[0110] Nucleic acid constructs encoding different versions of HA proteins (A/South Carolina/1/1918, GenBank AF117241; A/PR/8/1934, GenBank ABD77675; A/New Caledonia/20/1999, GenBank AY289929; and A/California/04/2009, GenBank FJ966082 and NA proteins (A/Brevig Mission/1/1918, GenBank AAF77036; A/New Caledonia/20/1999, GenBank CAD57252; and A/California/04/2009, GenBank FJ966084) were synthesized using human-preferred codons as described (Kong, W.-P. et al. Protective immunity to lethal challenge of the 1918 pandemic influenza virus by vaccination. Proc. Natl. Acad. Sci. USA 103, 15987-15991 (2006)) by GeneArt. The glycosylation site mutations were introduced using the QuikChange Site-Directed Mutagenesis kit (Agilent Technologies).

[0111] The recombinant lentiviral vectors expressing a luciferase reporter gene were produced as described (Yang, Z.-Y. et al. Immunization by avian H5 influenza hemagglutinin mutants with altered receptor binding specificity. Science 317, 825-828 (2007)_. For the production of H1N1 pseudoviruses, a human type 2 transmembrane serine protease TMPRSS2 gene was included in transfection for the proteolytic activation of HA (E. Böttcher, T. Matrosovich, M. Beyerle, H. D. Klenk, W. Garten, M. Matrosovich, Proteolytic activation of influenza viruses by serine proteases TMPRSS2 and HAT from human airway epithelium. J. Virol., 80, 9896-9898 (2006)).

[0112] Influenza A/California/04/2009 (H1N1) is also referred to herein as influenza A (H1N1) 2009 (CA 04/09), A (H1N1) 2009, A(H1N1) 2009, and 2009 CA.

[0113] Influenza A/South Carolina/1/1918 (H1N1) is also referred to herein as A (H1N1) 1918 (SC), H1N1 (1918 SC), and 1918 SC.

[0114] Influenza A/New Caledonia/20/1999 is also referred to herein as A (H1N1) 1999 (NC), H1N1 1999 (New Caledonia), and 1999 NC.

### Example 1

[0115] To examine whether there was cross-reactive neutralization between 1918 and 2009 H1N1 pandemic influenza viruses, mice were immunized with a nucleic acid construct encoding hemagglutinin (HA) from influenza A (H1N1) 2009 (CA 04/09) [VRC 9328; SEQ ID NO:63], A (H1N1) 1918 (SC) [VRC 7730; SEQ ID NO:1] or A (H1N1) 1999 (NC) [VRC 7722; FIG. 18], and the specificity of the neutralizing immune response assessed. The immunization protocol has been described by Kong, W.-P. et al. (Protective immunity to lethal challenge of the 1918 pandemic influenza virus by vaccination. Proc. Natl. Acad. Sci. USA 103, 15987-15991 (2006)). Briefly, 6-8 week old, female BALB/c mice (Jackson Laboratories) were immunized intramuscularly at weeks 0, 3, and 6 with 15 μg of the indicated nucleic acid construct in 100 μl of phosphate buffered saline (PBS) at pH 7.4. Blood was then collected 14 days after each immunization and the serum isolated and assessed using the pseudotyped lentiviral reporter assay described by Yang, Z.-Y. et al. (Immunization by avian H5 influenza hemagglutinin mutants with altered receptor binding specificity. Science 317, 825-828 (2007)). Briefly, HA NA-pseudotyped lentiviral vectors encoding luciferase were first titrated by serial dilution. Similar amounts of virus (p24˜6.25 ng/ml) were then incubated with indicated amounts of mouse antisera for 20 minutes at room temperature (RT) and added to 293A cells (10,000 cells per well; 50 μl/well, in triplicate). For 1918 SC-pseudotyped and 1999 NC-pseudotyped vectors, plates were washed and replaced with fresh media 2 hours later, and luciferase activity was measured after 24 hours. For 2009 CA-pseudotyped vectors, 293A cells were incubated with virus overnight and luciferase activity measured after 72 hours. Monoclonal antibody (mAb) C179 was used to standardize the input virus used in the neutralization assay. The results of this study are shown in FIG. 1a.

[0116] Remarkably, antisera from the H1N1 (1918 SC) immune mice neutralized heterologous A(H1N1) 2009 virus entry to a high titer, almost as high as the homologous strain (FIG. 1a, 1918, left vs. middle panel). Conversely, antisera from A (H1N1) 2009 immune mice neutralized both viruses to a high titer in contrast to non-immune sera or to antisera to a seasonal influenza virus, H1N1 1999 (New Caledonia) (FIG. 1a, 2009 vs. control and NC, left and middle panels). In contrast, the seasonal 1999 NC antisera showed strong homologous neutralization but failed to neutralize either the 2009 CA or the 1918 SC virus (FIG. 1a, 1999 NC, right vs. left and middle panels). These results were unexpected, given the longer chronologic separation of A (H1N1) 2009 (CA 04/09) from 1918 than 1999.

[0117] Similar cross-reactivity was observed using a hemagglutination inhibition (HI) assay previously described by Yang (Yang, Z.-Y. et al. Immunization by avian H5 influenza hemagglutinin mutants with altered receptor binding specificity. Science 317, 825-828 (2007)). The results of this experiment are shown in FIG. 1b. Vaccine sera directed to 1918 SC showed the highest HI titer to matched virus and recognized A (H1N1) 2009 but not seasonal 1999 NC (FIG. 1b, left panel). Similarly, A (H1N1) 2009 immune sera reacted with A (H1N1) 2009 and, to a lesser extent, 1918 SC but not 1999 NC (FIG. 1b, middle panel), while 1999 NC immune sera exhibited homologous HI reactivity only (FIG. 1b, right panel).

[0118] To understand the mechanism of cross-neutralization, competition studies were performed. Purified recombinant 1918 SC or A (H1N1) 2009 trimeric HA was used to block neutralization of 1918 SC, A (H1N1) 2009, or 1999 NC virus. The results of these studies are shown in FIG. 1c. While these trimeric HA proteins were able to inhibit neutralization by antisera to both pandemic viruses, they failed to inhibit the seasonal 1999 NC virus (FIG. 1c). Conversely, the 1999 NC trimeric HA inhibited autologous virus but did not block neutralization by either the 1918 SC or A (H1N1) 2009 (CA 04/09) antisera (FIG. 1c, far right panel). Recent studies have shown the presence of a highly conserved domain in the stem of the viral HA, a potential structure that might be involved in cross-neutralization of diverse viruses [Okuno, Y., Isegawa, Y., Sasao, F. & Ueda, S. A common neutralizing epitope conserved between the hemagglutinins of influenza A virus H1 and H2 strains. J. Virol. 67, 2552-2558 (1993); Ekiert, D. C. et al. Antibody recognition of a highly conserved influenza virus epitope. Science 324, 246-251 (2009); Sui, J. et al. Structural and functional bases for broad-spectrum neutralization of avian and human influenza A viruses. Nat. Struct. Mol. Biol. 16, 265-273 (2009)]; however, there is greater than 94% identity between the seasonal and pandemic viruses in this region. Because no inhibition was observed with the 1999 NC and this virus is sensitive to neutralization by anti-stem antibodies [Okuno, Y., Isegawa, Y., Sasao, F. & Ueda, S. A common neutralizing epitope conserved between the hemagglutinins of influenza A virus H1 and H2 strains. J. Virol. 67, 2552-2558 (1993); Smirnov, Y. A. et al. An epitope shared by the hemagglutinins of H1, H2, H5, and H6 subtypes of influenza A virus. Acta Virol. 43, 237-244 (1999)], these data suggested that the conserved stem region of the spike was not likely a target of neutralization. Instead, these cross-inhibition studies implicated the head region as the site of neutralization.

### Example 2

[0119] To determine whether the immune responses observed in Example 1 provided cross-protection in vivo, mice were immunized with inactivated virus vaccines derived from pandemic or seasonal influenza viruses and challenged with a highly lethal mouse-adapted A (H1N1) 2009 virus. Inactivated virus was prepared by concentrating virus from allantoic fluid, purifying the virus on a linear sucrose gradient, and then treating the purified virus at a concentration of 1 mg/ml with 0.025% formalin at 4C for 3 days. This treatment results in complete loss of infectivity of the virus. Groups of BALB/c mice (n=12) were anesthetized with Avertin (Sigma-Aldrich, St Louis, Mo.) and injected intramuscularly (i.m.) with 10 μg of formalin-inactivated vaccine. Mice received two inoculations at an interval of 3 weeks, and were challenged 6 weeks after the initial vaccination. For challenge, anesthetized mice received 50 μl of infectious A/California/04/2009 virus (10⁶ PFU) diluted in PBS and inoculated intranasally. Four days later, four mice from each group were euthanized and lungs (n=4) were collected and homogenized in 1 ml of cold PBS. Solid debris was pelleted by centrifugation and tissues were titrated for virus infectivity in a standard plaque assay. The eight remaining mice in each group were checked daily for disease signs and death for 21 days post-challenge. The results of this study are shown below in Tables 1A and 1B.

TABLE 1
Protective efficacy of H1N1 vaccines against pandemic
influenza A (H1N1) 2009 virus in mice.
A.

| | Weight | Mean virus | No. |
|---|---|---|---|
| | loss | titer in lung | protected/ |
| Vaccine group | (%) | (log₁₀PFU/ml) | total no |
| PBS | 18.5 | 6.8 | 0/8 |
| 1999 Pan (H3N2) | 18.8 | 6.1 | 0/8 |
| 1999 NC | 17.9 | 5.5 | 1/8 |
| 2007 Brisbane | 13 | 5.6 | 2/8 |
| 1918 SC | 3.7 | ≦0.9 | 8/8^{e} |
| 2009 (Mex/4108) | 1.7 | ≦0.9 | 8/8^{e} |

B.

| Vaccine group | HI antibody titer to homologous virus |
|---|---|
| PBS | <10 |
| 1999 Panama/2007/1999 (H3N2) | 76 |
| A/New Caldonia/20/1999 | 80 |
| A/Brisbane/59/2007 | 57 |
| A/SouthCarolina/1/1918 | 59 |
| A/Mexico/4108/2009 | 50 |

[0120] The results show that animals immunized with the 1918 SC or A (H1N1) 2009 inactivated virus vaccines were completely protected from lethality and showed >5 logs reduction in viral titers, in contrast to seasonal influenza vaccines or non-immune controls. Immunization with the 1918 SC pandemic strain vaccine therefore conferred protection against A (H1N1) 2009, documenting its ability to cross-protect in vivo. Conversely, immunization with A (H1N1) 2009 vaccine also protected mice from lethal 1918 SC challenge.

[0121] Immunization with a nucleic acid construct encoding A/California/04/2009 (H1N1) HA [VRC 9328; SEQ ID NO:63] also protected mice from challenge by 1918 SC or 2009 CA. For this study, groups of mice BALB/c mice (n=10) were anesthetized as described above, and injected intramuscularly (i.m.) with 15 μg of empty vector or a nucleic acid construct encoding the 2009 CA HA protein. Mice were inoculated at 0, 2 and 4 weeks, and were challenged 7 weeks after the initial innoculation. For challenge, anesthetized mice were intransally administered 50 μl of PBS of either 17,000 LD50 of mouse-adapted A/California/04/2009 virus or 100 LD50 A/South Carolina/1918 virus. Four days later, four mice from each group were euthanized and lungs were collected and homogenized in 1 ml of cold PBS. Solid debris was pelleted by centrifugation and tissues were titrated for virus infectivity in a standard plaque assay. The eight remaining mice in each group were checked daily for disease signs and death for 21 days post-challenge. The results of this study are shown below in Table 2.

TABLE 2
Protective efficacy of 2009 CA HA DNA vaccine
against 1918 SC and 2009 CA viruses in mice

| | | | Mean Virus | Number |
|---|---|---|---|---|
| | Chal- | Weight | Titer in Lung | protected/ |
| | lenge | Loss | (log₁₀ | total |
| Vaccine Group | Virus | (%) | PFU/ml) | number |
| Control DNA | 2009 CA | 18.0 ± 0.00 | 7.48 ± 0.00 | 0/5 |
| A/California/ | 2009 CA | 1.1 ± 2.19 | 5.44 ± 0.96 | 5/5 |
| 04/2009 | | | | |
| Control DNA | 1918 SC | 19.4 ± 5.34 | 6.46 ± 0.08 | 0/5 |
| A/California/ | 1918 SC | 5.9 ± 6.91 | 5.46 ± 0.19 | 5/5 |
| 04/2009 | | | | |

### Example 3

[0122] This Example describes studies aimed at further defining the molecular basis of cross-neutralization by examining the amino acid diversity and glycosylation site conservation among diverse HAs. The amino acid identity between the 1918 SC and A (H1N1) 2009 HA proteins within the globular head is approximately 79.8% (amino acids 64-286, 1918 numbering). This level of amino acid divergence was similar to the divergence among seasonal influenza viruses and would likely confer resistance to antibody neutralization; however, the top part of the RBD adjacent to the 2,6-sialic acid recognition sites includes a large region (amino acids 131-143, 170-182, 205-215 and 257-262, 1918 numbering) of over 6000 Å² per trimer that is 95% conserved between these pandemic strains. (Surface area was calculated using AREAIMOL in the CCP4 suite; Collaborative Computational Project, Number 4, The CCP4 Suite: Programs for protein crystallography. Acta Crystallogr. D. Biol. Crystallogr. 50, 760-763 (1994)). In contrast, there was a notable difference in conserved glycosylation sites on the RBD in pandemic and seasonal strains. The pandemic viruses from 1918 and 2009 lacked two glycosylation sites (142 and 177, 1918 numbering) on the head of the spike (FIGS. 2a and b, left panels). These sites are highly conserved among seasonal influenza viruses, exemplified by 1999 NC virus (FIGS. 2a and b, right panels). Modeling of these glycosylation sites reveals the extensive additional chemical structure conferred by carbohydrate modification that would serve to shield the receptor binding domain from antibody neutralization (FIG. 2b, right vs. left panel). The presence of these glycosylation sites was analyzed further using the NCBI Influenza Virus Resource (Bao, Y. et al. The influenza virus resource at the National Center for Biotechnology Information. J. Virol. 82, 596-601 (2008)). This analysis revealed the acquisition of two glycosylation sites on the top of the RBD by the early 1940s (FIG. 2c and Table 4). As can be seen in Table 3, from 1977 to 2008, the presence of at least one of the two glycosylation sites is observed in 97.8% of seasonal strains, and both glycosylation sites in 87.8%.

TABLE 3
The evolution of human H1N1 HA glycosylation patterns from 1918 to 2009

| Strain | Stem | | Side of head | | | | Top of head | | | | | Side of head | Stem | | |
|---|---|---|---|---|---|---|---|---|---|---|---|---|---|---|---|
| H1N1/South Carolina/1918 | 28 | 40 | | | | 104 | | | | | | | 304 | 498 | 557 |
| H1N1/WSN/1933a | 28 | | | 73 | | | 142 | | | | | 286 | | 498 | 557 |
| H1N1/WSN/1933b | 28 | | | 73 | | | 142 | | | | | 286 | | 498 | 557 |
| H1N1/WSN/TS61/1933 | 28 | | | 73 | | | 142 | | | | | 286 | | 498 | 557 |
| H1N1/Wilson-Smith/1933a | 28 | 40 | | | | | | | | | 179 | 286 | 304 | 498 | 557 |
| H1N1/Wilson-Smith/1933b | 28 | 40 | | 73 | | | 142 | | | | | 286 | | 498 | 557 |
| H1N1/PR/8 1934 | 28 | 40 | | | | | | 144 | | | | 286 | 304 | 498 | 557 |
| H1N1/Puerto Rico/8/1934a | 28 | 40 | | | | | | | | | | 286 | 304 | 498 | 557 |
| H1N1/Puerto Rico/8/1934b | 28 | 40 | | | | | | | | | | 286 | 304 | 498 | 557 |
| H1N1/Puerto Rico/8/1934c | 28 | 40 | | | | | | | | | | 286 | 304 | 498 | 557 |
| H1N1/Puerto Rico/8-SV14/1934 | 28 | 40 | | | | | | | | | | 286 | 304 | 498 | 557 |
| H1N1/Puerto Rico/8/Mt Sinai/1934 | 28 | 40 | | | | | | | | | | 286 | 304 | 498 | 557 |
| H1N1/Alaska/1935 | 28 | 40 | | | | | | | | | | 286 | 304 | 498 | 557 |
| H1N1/Philadelphia/1935 | 28 | 40 | | | | | | 144 | | | | 286 | 304 | 498 | 557 |
| H1N1/Melbourne/1935 | 28 | 40 | | | | | | 144 | | | | 286 | 304 | 498 | 557 |
| H1N1/Henry/1936 | 28 | 40 | | | | | | | | | | 286 | 304 | 498 | 557 |
| H1N1/Hickox/1940 | 28 | 40 | | | | 104 | | | | | 179 | 286 | 304 | 498 | 557 |
| H1N1/Bellamy/1942 | 28 | 40 | | | | 104 | | 144 | | | 179 | 286 | 304 | 498 | 557 |
| H1N1/Weiss/1943 | 28 | 40 | | | | 104 | | | | | | 286 | 304 | 498 | 557 |
| H1N1/Iowa/1943 | 28 | 40 | | | | 104 | | | | | 178 | 286 | 304 | 498 | 557 |
| H1N1/Marton/1943 | 28 | 40 | | | | 104 | | 144 | | | 179 | 286 | 304 | 498 | 557 |
| H1N1/Huston/1945 | 28 | 40 | | | | 104 | | 144 | | | 179 | 286 | 304 | 498 | 557 |
| H1N1/Cameron/1946 | 28 | 40 | | | | | | | | | 179 | 286 | 304 | 498 | 557 |
| H1N1/1947 FM/1/1947a | 28 | 40 | | | | | | 144 | | | | 286 | 304 | 498 | 557 |
| H1N1/1947 FM/1/1947b | 28 | 40 | | | | | | 144 | | | | 286 | 304 | 498 | 557 |
| H1N1/Albany/4835/1948 | 28 | 40 | | | | 104 | | 144 | | | 179 | 286 | 304 | 498 | 557 |
| H1N1/Roma/1949 | 28 | 40 | | | | 104 | | 144 | | 177 | | 286 | 304 | 498 | 557 |
| H1N1/Albany/4836/1950 | 28 | 40 | | | | 104 | | 144 | | | | 286 | 304 | 498 | 557 |
| H1N1/Fort Worth/1950 | 28 | 40 | | | 90 | | | | 172 | | | | 304 | 498 | 557 |
| H1N1/Albany/12/1951 | 28 | 40 | | | 90 | 104 | | 144 | 172 | 177 | | 286 | 304 | 498 | 557 |
| H1N1/Albany/14/1951 | 28 | 40 | | | 90 | 104 | | 144 | 172 | 177 | | 286 | 304 | 498 | 557 |
| H1N1/Albany/1618/1951 | 28 | 40 | | | 90 | 104 | | 144 | 172 | 177 | | 286 | 304 | 498 | 557 |
| H1N1/Leningrad/1954 | 28 | 40 | | | | 104 | | 144 | | 177 | | 286 | 304 | 498 | 557 |
| H1N1/Malaysia/1954 | 28 | 40 | | | 90 | | | 144 | | | | 286 | 304 | 498 | 557 |
| H1N1/Denver/1957 | 28 | 40 | | | | 104 | 142 | | 172 | 177 | | | 304 | 498 | 557 |
| H1N1/Tokyo/3/1967 | 28 | 40 | | | | | | | | | | 286 | 304 | 498 | 557 |
| H1N1/New Jersey/1976 | 28 | 40 | | | | 104 | | | | | | | 304 | 498 | 557 |
| H1N1/NewJersey/8/1976 | 28 | 40 | | | | 104 | | | | | | | 304 | 498 | 557 |
| H1N1/New Jersey/11/1976 | 28 | 40 | | | | 104 | | | | | | | 304 | 498 | 557 |
| H1N1/Tientsin/1977 | 28 | 40 | | | | 104 | | 144 | | 177 | | 286 | 304 | 498 | 557 |
| H1N1/USSR90/1977a | 28 | 40 | | | | 104 | | 144 | | 177 | | 286 | 304 | 498 | 557 |
| H1N1/USSR90/1977b | 28 | 40 | | | | 104 | | 144 | | 177 | | 286 | 304 | 498 | 557 |
| H1N1/USSR90/1977c | 28 | 40 | | | | 104 | | 144 | | 177 | | 286 | 304 | 498 | 557 |
| H1N1/USSR92/1977 | 28 | 40 | | | | 104 | | 144 | | 177 | | 286 | 304 | 498 | 557 |
| H1N1/Hong Kong/117/1977 | 28 | 40 | | | | 104 | | 144 | | 177 | | 286 | 304 | 498 | 557 |
| H1N1/Albany/20/1978 | 28 | 40 | | | | 104 | | 144 | | 177 | | 286 | 304 | 498 | 557 |
| H1N1/Arizona/14/1978 | 28 | 40 | | | | 104 | | 144 | | 177 | | 286 | 304 | 498 | 557 |
| H1N1/Brazil/11/1978 | 28 | 40 | | | | 104 | | 144 | | 177 | | 286 | 304 | 498 | 557 |
| H1N1/California/10/1978 | 28 | 40 | | | | 104 | | 144 | | 177 | | 286 | 304 | 498 | 557 |
| H1N1/California/45/1978 | 28 | 40 | | | | 104 | | 144 | | 177 | | 286 | 304 | 498 | 557 |
| H1N1/Lackland/03/1978 | 28 | 40 | | | | 104 | | 144 | | 177 | | 286 | 304 | 498 | 557 |
| H1N1/Lackland/07/1978 | 28 | 40 | | | | 104 | | | | 177 | | 286 | 304 | 498 | 557 |
| H1N1/Memphis/10/1978 | 28 | 40 | | | | 104 | | 144 | | 177 | | 286 | 304 | 498 | 557 |
| H1N1/Memphis/13/1978 | 28 | 40 | | | | 104 | | 144 | | 177 | | 286 | 304 | 498 | 557 |
| H1N1/USSR46/1979 | 28 | 40 | | | | 104 | | 144 | | 177 | | 286 | 304 | 498 | 557 |
| H1N1/India/6263/1980 | 28 | 40 | | | | 104 | | 144 | | 177 | | 286 | 304 | 498 | 557 |
| H1N1/Baylor/11515/1982 | 28 | 40 | | | | 104 | | | | 177 | | 286 | 304 | 498 | 557 |
| H1N1/Fiji/15899/1983 | 28 | 40 | | | | 104 | | 144 | | 177 | | 286 | 304 | 498 | 557 |
| H1N1/Memphis/1983 | 28 | 40 | | | | 104 | | 144 | | 177 | | 286 | 304 | 498 | 557 |
| H1N1/Tonga/14/1984 | 28 | 40 | | | | 104 | | 144 | | 177 | | 286 | 304 | 498 | 557 |
| H1N1/Mongolia/231/1985 | 28 | 40 | | | | 104 | | 144 | | 177 | | 286 | 304 | 498 | 557 |
| H1N1/Memphis/12/1986 | 28 | 40 | 71 | | | 104 | 142 | | | 177 | | 286 | 304 | 498 | 557 |
| H1N1/Singapore/6/1986 | 28 | 40 | 71 | | | 104 | 142 | | | 177 | | 286 | 304 | 498 | 557 |
| H1N1/Memphis/01/1987 | 28 | 40 | 71 | | | 104 | 142 | | | 177 | | 286 | 304 | 498 | 557 |
| H1N1/Mongolia/153/1988 | 28 | 40 | | | | | | | | | | 286 | 304 | 498 | 557 |
| H1N1/Suita/01/1989 | 28 | 40 | 71 | | | 104 | 142 | | | 177 | | 286 | 304 | 498 | 557 |
| H1N1/Texas/36/1991 | 28 | 40 | 71 | | | 104 | 142 | | | 177 | | 286 | 304 | 498 | 557 |
| H1N1/Mongolia/162/1991 | 28 | 40 | 71 | | | 104 | 142 | | | 177 | | 286 | 304 | 494 | 553 |
| H1N1/Mongolia/111/1991 | 28 | 40 | | | | | | | | | | 286 | 304 | 493 | 552 |
| H1N1/New York/604/1995 | 28 | 40 | 71 | | | 104 | 142 | | | 177 | | | 304 | 498 | 557 |
| H1N1/Switzerland/5389/1995 | 28 | 40 | 71 | | | 104 | 142 | | | 177 | | 286 | 304 | 498 | 557 |
| H1N1/Beijing/262/1995 | 28 | 40 | 71 | | | 104 | | | | 177 | | | 304 | 498 | 557 |
| H1N1/New York/626/1996 | 28 | 40 | 71 | | | 104 | 142 | | | 177 | | | 304 | 498 | 557 |
| H1N1/TW/3355/1997 | 28 | 40 | 71 | | | 104 | 142 | | | 177 | | 286 | 304 | 498 | 557 |
| H1N1/Hong Kong/1131/1998 | 28 | 40 | 71 | | | 104 | 142 | | | 177 | | | 304 | 498 | 557 |
| H1N1/South Wales/18/1999 | 28 | 40 | 71 | | | 104 | 142 | | | 177 | | | 304 | 498 | 557 |
| H1N1/TW/4845/1999 | 28 | | 71 | | | 104 | 142 | | | 177 | | 286 | | 498 | 557 |
| H1N1/New Caledonia/20/1999 | 28 | 40 | 71 | | | 104 | 142 | | | 177 | | | 304 | 498 | 557 |
| H1N1/Canterbury/05/2000 | 28 | 40 | 71 | | | 104 | 142 | | | 177 | | | 304 | 498 | 557 |
| H1N1/Auckland/579/2000 | 28 | 40 | 71 | | | 104 | 142 | | | 177 | | | 304 | 498 | 557 |
| H1N1/Memphis/01/2001 | 28 | 40 | 71 | | | 104 | 142 | | | 177 | | | 304 | 498 | 557 |
| H1N1/New York/494/2002 | 28 | 40 | 71 | | | 104 | 142 | | | 177 | | | 304 | 498 | 557 |
| H1N1/Memphis/05/2003 | 28 | 40 | 71 | | | 104 | 142 | | | 177 | | | 304 | 498 | 557 |
| H1N1/Canterbury/106/2004 | 28 | 40 | 71 | | | 104 | 142 | | | 177 | | | 304 | 498 | 557 |
| H1N1/Auckland/619/2005 | 28 | 40 | 71 | | | 104 | 142 | | | 177 | | | 304 | 498 | 557 |
| H1N1/Thailand/CU41/2006 | 28 | 40 | 71 | | | 104 | 142 | | | 177 | | | 304 | 498 | 557 |
| H1N1/Solomon Islands/3/2006 | 28 | 40 | 71 | | | 104 | 142 | | | 177 | | | 304 | 498 | 557 |
| H1N1/Arizona/13/2007 | 28 | 40 | 71 | | | 104 | 142 | | | 177 | | | 304 | 498 | 557 |
| H1N1/Brisbane/59/2007 | 28 | 40 | 71 | | | 104 | 142 | | | 177 | | | 304 | 498 | 557 |
| H1N1/California/39/2007 | 28 | 40 | 71 | | | 104 | 142 | | | 177 | | | 304 | 498 | 557 |
| H1N1/Colorado/39/2007 | 28 | 40 | 71 | | | 104 | 142 | | | | | | 304 | 498 | 557 |
| H1N1/Florida/13/2007 | 28 | 40 | 71 | | | 104 | 142 | | | 177 | | | 304 | 498 | 557 |
| H1N1/Hawaii/46/2007 | 28 | 40 | 71 | | | 104 | 142 | | | 177 | | | 304 | 498 | 557 |
| H1N1/Illinois/11/2007 | 28 | 40 | 71 | | | 104 | 142 | | | | | | 304 | 498 | 557 |
| H1N1/Nebraska/02/2007 | 28 | 40 | 71 | | | 104 | 142 | | | 177 | | | 304 | 498 | 557 |
| H1N1/New Jersey/16/2007 | 28 | 40 | 71 | | | 104 | | | | 177 | | | 304 | 498 | 557 |
| H1N1/New York/16/2007 | 28 | 40 | 71 | | | 104 | 142 | | | 177 | | | 304 | 498 | 557 |
| H1N1/Oregon/07/2007 | 28 | 40 | 71 | | | 104 | 142 | | | 177 | | | 304 | 498 | 557 |
| H1N1/Texas/70/2007 | 28 | 40 | 71 | | | 104 | 142 | | | 177 | | | 304 | 498 | 557 |
| H1N1/Alaska/03/2008 | 28 | 40 | 71 | | | 104 | 142 | | | 177 | | | 304 | 498 | 557 |
| H1N1/California/07/2008 | 28 | 40 | 71 | | | 104 | 142 | | | 177 | | | 304 | 498 | 557 |
| H1N1/Denmark/05/2008 | 28 | 40 | 71 | | | 104 | 142 | | | 177 | | | 304 | 498 | 557 |
| H1N1/Georgia/05/2008 | 28 | 40 | 71 | | | 104 | 142 | | | 177 | | | 304 | 498 | 557 |
| H1N1/Idaho/09/2008 | 28 | 40 | 71 | | | 104 | 142 | | | | | | 304 | 498 | 557 |
| H1N1/Japan/AF07/2008 | 28 | 40 | 71 | | | 104 | 142 | | | 177 | | | 304 | 498 | 557 |
| H1N1/Massachusetts/01/2008 | 28 | 40 | 71 | | | 104 | 142 | | | 177 | | | 304 | 498 | 557 |
| H1N1/Minnesota/24/2008 | 28 | 40 | 71 | | | 104 | | | | 177 | | | 304 | 498 | 557 |
| H1N1/Missouri/06/2008 | 28 | 40 | 71 | | | 104 | | | | 177 | | | 304 | 498 | 557 |
| H1N1/Norway/256/2008 | 28 | 40 | 71 | | | 104 | 142 | | | 177 | | | 304 | 498 | 557 |
| H1N1/Stockholm/06/2008 | 28 | 40 | 71 | | | 104 | 142 | | | 177 | | | 304 | 498 | 557 |
| H1N1/Taiwan/70013/2008 | 28 | 40 | 71 | | | 104 | 142 | | | 177 | | | 304 | 498 | 557 |
| H1N1/California/04/2009 | 28 | 40 | | | | 104 | | | | | | | 304 | 498 | 557 |
| H1N1/Ancona/05/2009 | 28 | 40 | | | | 104 | | | | | | | 304 | 498 | 557 |
| H1N1/Canada-MB/RV2013/2009 | 28 | 40 | | | | 104 | | | | | | | 304 | 498 | 557 |
| H1N1/Japan/1070/2009 | 28 | 40 | | | | 104 | | | | | | | 304 | 498 | 557 |
| H1N1/Mexico/InDRE4114/2009 | 28 | 40 | | | | 104 | | | | | | | 304 | 498 | 557 |
| H1N1/Nanjing/1/2009 | 28 | 40 | | | | 104 | | | | | | | 304 | 498 | 557 |
| H1N1/New York/19/2009 | 28 | 40 | | | | 104 | | | | | | | 304 | 498 | 557 |
| H1N1/Paris/2722/2009 | 28 | 40 | | | | 104 | | | | | | | 304 | 498 | 557 |
| H1N1/Perth/29/2009 | 28 | 40 | | | | 104 | | | | | | | 304 | 498 | 557 |
| H1N1/Sao Paulo/43812/2009 | 28 | 40 | | | | 104 | | | | | | | 304 | 498 | 557 |
| H1N1/Stockholm/31/2009 | 28 | 40 | | | | 104 | | | | | | | 304 | 498 | 557 |
| H1N1/Texas/05/2009 | 28 | 40 | | | | 104 | | | | | | | 304 | 498 | 557 |

[0123] A few exceptions which lack these RBD glycosylation sites include the swine-related flu strains detected in 1976 as well as limited outbreaks detected in 1967, 1988 and 1991 (Table 3). These findings suggest that glycosylation on the top of the RBD is absent from pandemic viruses but present on nearly all seasonal influenza viruses, and the glycosylation sites of the RBD are likely to play a role in evading the human immune response.

TABLE 4
Evolution of H1N1 glycosylation and sequence variation in various time periods

| | | | | | | | | | | | | | | | | RBD-A |
|---|---|---|---|---|---|---|---|---|---|---|---|---|---|---|---|---|
| | | | | | | | | | | | | | | | | Conservation |
| | Stem | | Side of Head | | | | | Top of Head | | | | Side of Head | Stem | | | (%) |
| 1918 | 28 | 40 | | | | 104 | | | | | | | 304 | 498 | 557 | 100 |
| 1933 | 28 | | | 73 | | | 142 | | | | 179 | 286 | 304 | 498 | 557 | 80.5 |
| 1934-1939 | 28 | 40 | | | | | | 144 | | | | 286 | 304 | 498 | 557 | 73.9 |
| 1940-1948 | 28 | 40 | | | | 104 | | 144 | | | 179 | 286 | 304 | 498 | 557 | 66.1 |
| 1949-1957 | 28 | 40 | | | 90 | 104 | | 144 | 172 | 177 | | 286 | 304 | 498 | 557 | 63.2 |
| 1977-1985 | 28 | 40 | | | | 104 | | 144 | | 177 | | 286 | 304 | 498 | 557 | 65 |
| 1986-2008 | 28 | 40 | 71 | | | 104 | 142 | | | 177 | | 286 | 304 | 498 | 557 | 67.1 |
| 2009-Present | 28 | 40 | | | | 104 | | | | | | | 304 | 498 | 557 | 97.2 |

### Example 4

[0124] This Example demonstrates the role of glycans in protecting influenza virus against neutralization by antibodies. To confirm the role of the glycans described in the previous Examples, site-directed mutants were created that introduced glycosylation sites at amino acid positions 142 and 177 (1918 numbering) of 1918 SC and A (H1N1) 2009 (CA 04/09) hemagglutinin antigens. The resultant nucleic acid constructs were VRC 9449 (CMV/R 8 kb Influenza A/South Carolina/1/1918 (H1N1) HA [2G-142+177) and VRC 9446 (CMV/R Influenza A/California/04/2009 (H1N1) HA [2G-142+177]. The encoded HA proteins are also referred to as 1918 (2G) and 2009 (2G), respectively. Addition of the N-linked glycans to 1918 SC HA and 2009 CA HA proteins was confirmed by Endo H digestion and SDS-polyacrylamide gel electrophoresis (SDS-PAGE). Nucleic acid constructs encoding the ectodomain of wild-type (1918 and 2009) HA proteins, as well as nucleic acid constructs VRC 9449 and VRC 9446 (encoding 1918 (2G) and 2009 (2G), respectively, were expressed in 293F cells co-transfected with the relevant neuraminidase (NA), with or without the presence of swainsonine and kifunensine, to generate the physiologic trimer spike, as previously described (Wei, C. J. et al. Comparative efficacy of neutralizing antibodies elicited by recombinant hemagglutinin proteins from avian H₅N₁ influenza virus. J Virol. 82, 6200-6208 (2008)). Addition of the N-linked glycans to 1918 SC and 2009 CA HA proteins was confirmed by the increase in the size of the HA protein band, as observed by SDS-PAGE (FIG. 3A; band #1, compare 1918 to 1918 (2G), and 2009 to 2009 (2G)). HA proteins made in the presence of swainsonine and kifunensine were further treated with EndoH. Upon Endo H digestion (FIG. 3A; band #2), both wild-type HA and mutant HA proteins collapsed to the same size, indicating removal of complex carbohydrates and high mannose N-linked glycans. Addition of the N-linked glycans to 1918 SC HA and 2009 CA HA proteins was also confirmed by matrix-assisted laser desorption/ionization-mass spectrometry (MALDI-MS) (FIG. 3B).

[0125] Comparable expression of the wild-type and mutant HA proteins was verified by transfecting nucleic acid constructs encoding the wild-type HA and mutant HA proteins into 293 cells along with the relevant NA using PROFECTION® Mammalian Transfection System (Promega, Madison, Wis.). Twenty four hours after transfection, cells were removed using PBS containing 2 mM EDTA. Cells were then washed 2× with cold PBS and transferred to a 96-well plate (0.5×10⁶ cells/well). Cells were incubated with C179 monoclonal antibody (at 5 ug/ml) [Okuno, Y., et al. A common neutralizing epitope conserved between the hemagglutinins of influenza A virus H1 and H2 strains. J Virol. 67, 2552-2558 (1993)] or purified naïve mouse IgG control for 30 minutes on ice, washed, and incubated with ALEXA FLUOR® 488 goat anti-mouse IgG (Invitrogen, Carlsbad, Calif.) (1:2000) for 30 minutes on ice. Cells were then washed 2 times with cold PBS and fixed with 0.5% paraformaldehyde, after which the samples were analyzed using an LSR cell analyzer (BD Biosciences, San Jose, Calif.) and Flow Jo software (Tree Star, Ashland, Oreg.). The results are shown in FIG. 32A. This analysis confirmed comparable expression of the wild-type HA and mutant HA proteins having two glycosylation sites (2G). In addition to the flow-cytometry analysis, the ability of the C179 antibody to neutralize pseudotyped viruses containing either wild-type or mutant HA was measured. The results of this analysis, which are shown in FIG. 32B, demonstrate that input wild-type and glycosylation mutant pseudotyped viruses were neutralized by C179 to similar degrees (compare 1918 to 1918 (2G) and 2009 to 2009 (2G)).

[0126] Wild-type and mutant HA proteins were tested for their ability to affect neutralization of pseudotyped 1918 SC, 2009 CA and 1999 NC viruses. Neutralization assays were performed as described in Example 1. To measure the ability of glycosylated HA protein to affect neutralization by antisera, mouse antisera was diluted in 250 μl of culture medium and incubated for 30 minutes with 8×10⁶ 293F cells that had been transfected with nucleic acid constructs encoding either the wild-type HA or mutant HA protein and the relevant NA. The pre-absorbed sera were then collected and used for the neutralization assay, the results of which are shown in FIG. 33A. Absorption of antiserum with cells expressing wild-type 1918 or A (H1N1) 2009 HA protein removed the neutralizing antibody activity against both pandemic viruses (FIG. 33A, 1918 and 2009). In contrast, when the RBD glycosylation sites were introduced into the HA trimer, or when seasonal 1999 NC was used, the mutant HA proteins failed to absorb these neutralizing antibodies (FIG. 33A; 1918 (2G), 2009 (2G), NC). The seasonal 1999 NC HA protein effectively absorbed homologous neutralizing antibodies (FIG. 33A, far right panel).

[0127] The ability of the wild-type and mutant HA proteins to mediate viral entry into the cell was also investigated. Both the wild type and mutant 1918 SC and A (H1N1) 2009 HA proteins were similar in their ability to mediate gene transfer using pseudotyped lentiviral reporters (FIGS. 33B and C, left panels), showing that glycosylation did not compromise trimer function. The neutralization sensitivity of the glycosylated mutant reporters was then assessed by incubation of the mutant pseudotyped reporter viruses with antisera to 1918 SC or 2009 CA. Incubation of the glycosylated mutant reporters with antisera to 1918 SC or A (H1N1) 2009 greatly increased the concentration of antibody needed to inhibit entry of virus by 50% (that is, a lower IC₅₀ (median inhibitory concentration) titer. Therefore, the 1918 (2G) and A (H1N1) 2009 (2G) mutants were markedly resistant to neutralization, compared to their wild type counterparts [FIGS. 33B and C, middle and right panels, 1918 vs. 1918 (2G); 2009 vs. 2009 (2G); see also FIG. 34]. The glycan at amino acid 142 was largely responsible for neutralization resistance [see Table 5; 1918 SC (1G-142)]. In contrast, 1999 NC with glycosylation at either position 142 or 177 was sensitive to homologous neutralization but resistant to neutralization by 1918 SC or 2009 CA antisera. [Table 5; 1999 NC (1G-142) and (1G-177)]. Because the RBD-A region has only 58% to 67% sequence identity between seasonal and pandemic strains, 1918 SC or 2009 CA antisera would likely not neutralize seasonal strains, even without glycosylation. Neither 1918 SC nor 2009 CA antiserum neutralized A/PR/8/1934 (1934 PR8), a strain with one glycosylation site on the head region of the HA protein (144, 1918 SC numbering) (Table 5). Deglycosylation of the 1934 PR8 HA protein at that position did not confer complete sensitivity to 1918- or 2009-neutralizing antibodies [Table 5, 1934 PR8 (N144Q)]

TABLE 5

| | Virus | | | | | | | | |
|---|---|---|---|---|---|---|---|---|---|
| | | 1918 | 1918 | 1918 | | 1934 | | 1999 | 1999 |
| | 1918 | SC | SC | SC | 1934 | PR8 | 1999 | NC | NC |
| Immune sera | SC | (IG-142) | (IG-177) | (2G) | PR8 | (N144Q) | NC | (IG-142) | (IG-177) |
| 1918 SC | 4520 | 1073 | 3790 | 710 | 0 | 0 | <50 | 0 | 0 |
| 1934 PR8 | 0 | ND^{a} | ND | ND | 1499 | 1031 | ND | ND | ND |
| 1999 NC | 0 | ND | ND | ND | ND | ND | 1698 | 711 | 1795 |
| 2009 CA | 994 | 150 | 754 | 158 | 0 | <50 | 0 | 0 | 0 |

### Example 5

[0128] To explore the efficacy of glycan-modified and wild-type HA as vaccine immunogens, mice were immunized with nucleic acid constructs encoding 1918 (SC) HA [VRC 7730; SEQ ID NO:1] or 1918 SC (2G) HA [VRC 9449; SEQ ID NO:29] protein. The result of this study is shown in FIG. 35. Antisera from mice immunized with a nucleic acid construct encoding wild-type 1918 SC HA neutralized homologous virus but poorly inhibited the (2G) derivative. In contrast, 1918 SC (2G) immune sera neutralized both wild-type 1918 SC and mutant 1918 SC (2G) viruses. These data demonstrate that immunization with a nucleic acid construct encoding the RBD-A glycosylated HA (i.e., HA with a glycan-shielded RBD-A region) confers improved protection against a glycosylated variant that might evolve into a seasonal form of influenza. Immunization with such a nucleic acid construct also neutralizes the pandemic virus.

### Example 6

[0129] This Example describes in vivo testing of hemagglutinin antigens having one or two glycosylation sites in the RBD-A region.

[0130] CMV/R-based nucleic acid constructs comprising nucleic acid molecules encoding each of the following hemagglutinin antigens were produced as described herein.

| SEQ ID NO | Hemagglutinin antigen (HA) |
|---|---|
| SEQ ID NO: | A/Haishu/SWL110/2010/ADG21188 (H1N1) HA (which |
| 69 | includes an N-linked glycosylation site at AA 179) |
| SEQ ID NO: | A/Netherlands/1493b/2009/ADJ40554 (H1N1) HA (which |
| 73 | includes an N-linked glycosylation site at AA 136) |
| SEQ ID NO: | A/Orenburg/IIV-13/2010/ADF42661 (H1N1) HA (which |
| 77 | includes N-linked glycosylation sites at AA 136 and AA |
| | 179) |
| SEQ ID NO: | A/Orenburg/IIV-13/2010/AD199498 (H1N1) HA (which |
| 81 | includes an N-linked glycosylation site at AA 179) |
| SEQ ID NO: | A/Russia/178/2009/ADA79597 (H1N1) HA (which |
| 85 | includes an N-linked glycosylation site at AA 179) |
| SEQ ID NO: | A/Russia/180/2009/ADB81459 (H1N1) HA (which |
| 89 | includes an N-linked glycosylation site at AA 179) |
| SEQ ID NO: | A/Salekard/01/2009/ADA83044 (H1N1) HA (which |
| 93 | includes an N-linked glycosylation site at AA 179) |
| SEQ ID NO: | A/Tallinn/INS183/2010/ADG42553 (H1N1) HA (which |
| 97 | includes an N-linked glycosylation site at AA 179) |
| SEQ ID NO: | A/Beijing/SE2649/2009/ADD64214 (H1N1) HA (which |
| 101 | includes an N-linked glycosylation site at AA 179) |
| SEQ ID NO: | A/California/VRDL6/2010/ADI99550 (H1N1) HA (which |
| 105 | includes an N-linked glycosylation site at AA 179) |

[0131] Maps and nucleic acid sequences of these nucleic acid constructs are presented in the Figures; the nucleic acid sequences of these constructs are, respectively, SEQ ID NO:67, SEQ ID NO:71, SEQ ID NO:75, SEQ ID NO:79, SEQ ID NO:83, SEQ ID NO:87, SEQ ID NO:91, SEQ ID NO:95, SEQ ID NO:99, and SEQ ID NO:103.

[0132] The encoded hemagglutinin antigens have RBD-A regions homologous to those of pandemic influenza A/California/04/2009 (H1N1) HA except that the listed HAs have N-linked glycosylation sites as indicated. In view of having such glycosylation sites, the viruses from which these HAs are derived are thought to be evolving influenza A subtype H1 viruses. That is, they apparently are evolving from a pandemic strain into a seasonal strain: without being bound by theory, it is believed that mutations to encode glycosylation sites in the RBD-A region are occurring in order to evade an immune response directed against pandemic virus. It is to be appreciated that other mutations encoding different amino acids can also be part of an evasion mechanism.

[0133] The nucleic acid constructs are administered to mice as described in Example 1. Antisera are isolated from the mice as described in Example 1 and tested for their abilities to neutralize various influenza virus using methods as described herein. Virus that can be tested include homologous virus, pandemic virus, such as A/California/04/2009 (H1N1), other apparently-evolving virus, and seasonal virus strains. These antisera can also be compared to antisera isolated from mice administered a glycosylated-shielded immunogen, such as VRC 9449, a nucleic acid construct encoding 1918 SC [2G-142+177] hemagglutinin antigen.

[0134] The following table is provided as a reference to the sequences disclosed in this application.

TABLE 6
Sequence Reference Table

| | HA Protein | Nucleic | |
|---|---|---|---|
| | GenBank | Acid | |
| SEQ ID NO | Accession No. | Construct | Name/Description |
| 1 | | VRC 7730 | CMV/R 8 kb Influenza A/South Carolina/1/1918 |
| | | | (H1N1) HA-wt |
| 2 | | | Coding sequence |
| 3 | AAD17229 | | Translation of SEQ ID NO: 2 |
| 4 | | | Inverse Complement of SEQ ID NO: 2 |
| 5 | | VRC 7733 | CMV/R 8 kb Influenza A/South Carolina/1/1918 |
| | | | (H1N1) HA mut A short foldon-his |
| 6 | | | Coding sequence |
| 7 | AAD17229 | | Translation of SEQ ID NO: 6 |
| 8 | | | Inverse Complement of SEQ ID NO: 6 |
| 9 | | VRC 9259 | CMV/R 8 kb Influenza A/Brevig Mission/1/1918 |
| | | | (H1N1) NA/h |
| 10 | | | Coding sequence |
| 11 | AAF77036 | | Translation of SEQ ID NO: 10 |
| 12 | | | Inverse Complement of SEQ ID NO: 10 |
| 13 | | VRC 7764 | CMV/R 8 kb Influenza A/New Caledonia/20/1999 |
| | | | (H1N1) HA foldon-his |
| 14 | | | Coding sequence |
| 15 | AAP34324 | | Translation of SEQ ID NO: 14 |
| 16 | | | Inverse Complement of SEQ ID NO: 14 |
| 17 | | VRC 9450 | CMV/R Influenza A/California/04/2009 (H1N1) HA |
| | | | foldon His |
| 18 | | | Coding sequence |
| 19 | | | Translation of SEQ ID NO: 18 |
| 20 | | | Inverse Complement of SEQ ID NO: 18 |
| 21 | | VRC 9451 | CMV/R Influenza A H1N1 California/4/2009 |
| | | | NA_BlueH |
| 22 | | | Coding sequence |
| 23 | | | Translation of SEQ ID NO: 22 |
| 24 | | | Inverse Complement of SEQ ID NO: 22 |
| 25 | | VRC 9446 | CMV/R Influenza A/California/04/2009 (H1N1) HA/h |
| | | | BlueH w/glycosylation at AA 142 and AA 177 |
| | | | (encodes 2009 CA [2G-142 + 177] HA) |
| 26 | | | Coding sequence |
| 27 | | | Translation of SEQ ID NO: 26 |
| 28 | | | Inverse Complement of SEQ ID NO: 26 |
| 29 | | VRC 9449 | CMV/R 8 kb Influenza A/South Carolina/1/1918 |
| | | | (H1N1) HA w/glycosylation at AA 142 and AA 177 |
| | | | (encodes 1918 SC [2G-142 + 177] HA) |
| 30 | | | Coding sequence |
| 31 | | | Translation of SEQ ID NO: 30 |
| 32 | | | Inverse Complement of SEQ ID NO: 30 |
| 33 | | VRC 9444 | CMV/R Influenza A/California/04/2009 (H1N1) HA/h |
| | | | BlueH w/glycosylation at AA 142 (encodes 2009 CA |
| | | | [1G-142] HA) |
| 34 | | | Coding sequence |
| 35 | | | Translation of SEQ ID NO: 34 |
| 36 | | | Inverse Complement of SEQ ID NO: 34 |
| 37 | | VRC 9445 | CMV/R Influenza A/California/04/2009 (H1N1) HA/h |
| | | | BlueH w/glycosylation at AA 177 (encodes 2009 CA |
| | | | [1G-177] HA) |
| 38 | | | Coding sequence |
| 39 | | | Translation of SEQ ID NO: 38 |
| 40 | | | Inverse Complement of SEQ ID NO: 38 |
| 41 | | VRC 9447 | CMV/R 8 kb Influenza A/South Carolina/1/1918 |
| | | | (H1N1) HA w/glycosylation at AA 142 (encodes 1918 |
| | | | SC [1G-142] HA) |
| 42 | | | Coding sequence |
| 43 | | | Translation of SEQ ID NO: 42 |
| 44 | | | Inverse Complement of SEQ ID NO: 42 |
| 45 | | VRC 9448 | CMV/R 8 kb Influenza A/South Carolina/1/1918 |
| | | | (H1N1) HA w/glycosylation at AA 177 (encodes 1918 |
| | | | SC [1G-177] HA) |
| 46 | | | Coding sequence |
| 47 | | | Translation of SEQ ID NO: 46 |
| 48 | | | Inverse Complement of SEQ ID NO: 46 |
| 49 | AAD17229 | | Influenza A/South Carolina/1/1918 (H1N1) HA |
| 50 | FJ966082* | | Influenza A/California/04/2009 (H1N1) HA nucleic |
| | *nucleic acid | | acid sequence |
| | sequence | | |
| 51 | ACT83741 | | Influenza A/Ancona/05/2009 (H1N1) HA |
| 52 | ACT68118 | | Influenza A/Canada/MB/RV2013/2009 (H1N1) HA |
| 53 | ACT79133 | | Influenza A/Japan/1070/2009 (H1N1) HA |
| 54 | ACQ89903 | | Influenza A/Mexico/InDRE4114/2009 (H1N1) HA |
| 55 | ACS45017 | | Influenza A/Nanjing/1/2009 (H1N1) HA |
| 56 | ACP44147 | | Influenza A/New York/19/2009 (H1N1) HA |
| 57 | ACS91398 | | Influenza A/Paris/2722/2009 (H1N1) HA |
| 58 | ACR78160 | | Influenza A/Perth/29/2009 (H1N1) HA |
| 59 | ACT82516 | | Influenza A/Sao Paulo/43812/2009 (H1N1) HA |
| 60 | ACT21932 | | Influenza A/Stockholm/31/2009 (H1N1) HA |
| 61 | ACP41934 | | Influenza A/Texas/05/2009 (H1N1) HA |
| 62 | ACP41105 | | Influenza A/California/04/2009 (H1N1) HA |
| 63 | | VRC 9328 | CMV/R Influenza A/California/04/2009 (H1N1) HA |
| | | | BlueH |
| 64 | | | Coding sequence |
| 65 | ACP41105 | | Translation of SEQ ID NO: 64 |
| 66 | | | Inverse Complement of SEQ ID NO: 64 |
| 67 | | | CMV/R Influenza |
| | | | A/Haishu/SWL110/2010/ADG21188 (H1N1) HA |
| | | | (which includes an N-linked glycosylation site at AA |
| | | | 179) |
| 68 | | | Coding sequence |
| 69 | ADG21188 | | Translation of SEQ ID NO: 68 |
| 70 | | | Inverse Complement of SEQ ID NO: 68 |
| 71 | | | CMV/R Influenza |
| | | | A/Netherlands/1493b/2009/ADJ40554 (H1N1) HA |
| | | | (which includes an N-linked glycosylation site at AA |
| | | | 136) |
| 72 | | | Coding sequence |
| 73 | ADJ40554 | | Translation of SEQ ID NO: 72 |
| 74 | | | Inverse Complement of SEQ ID NO: 72 |
| 75 | | | CMV/R Influenza A/Orenburg/IIV- |
| | | | 13/2010/ADF42661 (H1N1) HA (which includes N- |
| | | | linked glycosylation sites at AA 136 and AA 179) |
| 76 | | | Coding sequence |
| 77 | ADF42661 | | Translation of SEQ ID NO: 76 |
| 78 | | | Inverse Complement of SEQ ID NO: 76 |
| 79 | | | CMV/R Influenza A/Orenburg/IIV-13/2010/AD199498 |
| | | | (H1N1) HA (which includes an N-linked glycosylation |
| | | | site at AA 179) |
| 80 | | | Coding sequence |
| 81 | AD199498 | | Translation of SEQ ID NO: 80 |
| 82 | | | Inverse Complement of SEQ ID NO: 80 |
| 83 | | | CMV/R Influenza A/Russia/178/2009/ADA79597 |
| | | | (H1N1) HA (which includes an N-linked glycosylation |
| | | | site at AA 179) |
| 84 | | | Coding sequence |
| 85 | ADA79597 | | Translation of SEQ ID NO: 84 |
| 86 | | | Inverse Complement of SEQ ID NO: 84 |
| 87 | | | CMV/R Influenza A/Russia/180/2009/ADB81459 |
| | | | (H1N1) HA (which includes an N-linked glycosylation |
| | | | site at AA 179) |
| 88 | | | Coding sequence |
| 89 | ADB81459 | | Translation of SEQ ID NO: 88 |
| 90 | | | Inverse Complement of SEQ ID NO: 88 |
| 91 | | | CMV/R Influenza A/Salekard/01/2009/ADA83044 |
| | | | (H1N1) HA (which includes an N-linked glycosylation |
| | | | site at AA 179) |
| 92 | ADA83044 | | Coding sequence |
| 93 | | | Translation of SEQ ID NO: 92 |
| 94 | | | Inverse Complement of SEQ ID NO: 92 |
| 95 | | | CMV/R Influenza A/Tallinn/INS183/2010/ADG42553 |
| | | | (H1N1) HA (which includes an N-linked glycosylation |
| | | | site at AA 179) |
| 96 | | | Coding sequence |
| 97 | ADG42553 | | Translation of SEQ ID NO: 96 |
| 98 | | | Inverse Complement of SEQ ID NO: 96 |
| 99 | | | CMV/R Influenza A/Beijing/SE2649/2009/ADD64214 |
| | | | (H1N1) HA (which includes an N-linked glycosylation |
| | | | site at AA 179) |
| 100 | | | Coding sequence |
| 101 | ADD64214 | | Translation of SEQ ID NO: 100 |
| 102 | | | Inverse Complement of SEQ ID NO: 100 |
| 103 | | | CMV/R Influenza |
| | | | A/California/VRDL6/2010/ADI99550 (H1N1) HA |
| | | | (which includes an N-linked glycosylation site at AA |
| | | | 179) |
| 104 | | | Coding sequence |
| 105 | ADI99550 | | Translation of SEQ ID NO: 104 |
| 106 | | | Inverse Complement of SEQ ID NO: 104 |
| 107 | | | CMV/R 8 kb Influenza H1 (A/PR8/8/1934) (H1N1) |
| | | | HA/h N144Q |
| 108 | | | Coding sequence |
| 109 | | | Translation of SEQ ID NO: 108 |
| 110 | | | Inverse Complement of SEQ ID NO: 108 |
| 111 | | | CMV/R 8 kb Influenza A/New Caledonia/20/1999 |
| | | | (H1N1) HA wt N142Q |
| 112 | | | Coding sequence |
| 113 | | | Translation of SEQ ID NO: 112 |
| 114 | | | Inverse Complement of SEQ ID NO: 112 |
| 115 | | | CMV/R 8 kb Influenza A/New Caledonia/20/1999 |
| | | | (H1N1) HA wt N177Q |
| 116 | | | Coding sequence |
| 117 | | | Translation of SEQ ID NO: 116 |
| 118 | | | Inverse Complement of SEQ ID NO: 116 |
| 119 | | VRC 9162 | CMV/R Influenza A/New Caledonia/20/1999 (H1N1) |
| | | | NA |
| 120 | | | Coding sequence |
| 121 | | | Translation of SEQ ID NO: 120 |
| 122 | | | Complement of SEQ ID NO: 120 |

[0135] While the present invention has been described with reference to the specific embodiments thereof, it should be understood by those skilled in the art that various changes may be made and equivalents may be substituted without departing from the true spirit and scope of the invention. In addition, many modifications may be made to adapt a particular situation, material, composition of matter, process, process step or steps, to the objective, spirit and scope of the present invention. All such modifications are intended to be within the scope of the claims.

1. An immunogen comprising a nucleic acid construct comprising a nucleic acid molecule encoding a protein comprising an influenza A subtype H1 hemagglutinin glycan-shielded receptor binding domain A (RBD-A) region and at least one influenza A subtype H1 hemagglutinin antigenic site selected from the group consisting of an HA1 globular head antigenic site and an HA2 antigenic site, wherein said antigenic site is not within the RBD-A region,
wherein said antigenic site elicits the production of neutralizing antibodies against an antigenic site of a pandemic influenza A subtype H1 HA, and
wherein said glycan-shielded RBD-A region is homologous to the RBD-A region of said pandemic influenza A subtype H1 HA, with the exception that said glycan-shielded RBD-A region comprises at least one N-linked glycosylation site and said pandemic RBD-A region lacks any N-glycosylation sites.

2-3. (canceled)

4. The immunogen of claim 1, wherein said glycan-shielded RBD-A region is at least 80% identical to said pandemic RBD-A region.

5. (canceled)

6. The immunogen of claim 1, wherein the encoded protein is selected from the group consisting of:
(a) a protein in which the glycan-shielded RBD-A region of said protein comprises an RBD-A region of an HA having an amino acid sequence selected from the group consisting of SEQ ID NO:27, SEQ ID NO:31, SEQ ID NO:35, SEQ ID NO:39, SEQ ID NO:43, and SEQ ID NO:47;
(b) a protein comprising the HA1 region of an HA having an amino acid sequence selected from the group consisting of SEQ ID NO:27, SEQ ID NO:31, SEQ ID NO:35, SEQ ID NO:39, SEQ ID NO:43, and SEQ ID NO:47; and,
(c) a protein comprising an amino acid sequence selected from the group consisting of SEQ ID NO:27, SEQ ID NO:31, SEQ ID NO:35, SEQ ID NO:39, SEQ ID NO:43, and SEQ ID NO:47.

7-9. (canceled)

10. The immunogen of claim 1, wherein said glycan-shielded RBD-A region comprises at least one region selected from the group consisting of:
(a) amino acids 131-143 from SEQ ID NO:27 or SEQ ID NO:31;
(b) amino acids 170-182 from SEQ ID NO:27 or SEQ ID NO:31;
(c) amino acids 205-215 from SEQ ID NO:27 or SEQ ID NO:31;
(d) amino acids 257-262 from SEQ ID NO:27 or SEQ ID NO:31; and
(e) amino acids 131-146 from SEQ ID NO:27 or SEQ ID NO:31.

11-12. (canceled)

13. The immunogen of claim 1, wherein said nucleic acid construct comprises a nucleic acid sequence selected from the group consisting of SEQ ID NO:25, SEQ ID NO:29, SEQ ID NO:33, SEQ ID NO:37, SEQ ID NO:41, and SEQ ID NO:45.

14-18. (canceled)

19. A method to elicit a neutralizing antibody immune response against an influenza A subtype H1 virus in a subject comprising administering to said subject the immunogen of claim 1.

20-23. (canceled)

24. A method to protect a subject from influenza A subtype H1 infection comprising administering to said subject the immunogen of claim 1.

25. A protein comprising at least a portion of a hemagglutinin antigen having an amino acid sequence selected from the group consisting of SEQ ID NO:27, SEQ ID NO:31, SEQ ID NO:35, SEQ ID NO:39, SEQ ID NO:43, and SEQ ID NO:47.

26. The protein of claim 25, wherein said portion comprises at least one region selected from the group consisting of:
(a) amino acids 131-143 from SEQ ID NO:27 or SEQ ID NO:31;
(b) amino acids 170-182 from SEQ ID NO:27 or SEQ ID NO:31;
(c) amino acids 205-215 from SEQ ID NO:27 or SEQ ID NO:31;
(d) amino acids 257-262 from SEQ ID NO:27 or SEQ ID NO:31; and
(e) amino acids 131-146 from SEQ ID NO:27 or SEQ ID NO:31.

27. The protein of claim 25, wherein said protein comprises the receptor binding domain from a hemagglutinin antigen comprising SEQ ID NO:27, SEQ ID NO:31, SEQ ID NO:35, SEQ ID NO:39, SEQ ID NO:43, and SEQ ID NO:47.

28. The protein of claim 25, wherein said protein comprises the RBD-A region from a hemagglutinin antigen comprising SEQ ID NO:27 or SEQ ID NO:31.

29. The protein of claim 25, wherein said protein comprises SEQ ID NO:27, SEQ ID NO:31, SEQ ID NO:35, SEQ ID NO:39, SEQ ID NO:43, and SEQ ID NO:47.

30. (canceled)

31. A nucleic acid molecule encoding the protein of claim 25.

32. An immunogen comprising a nucleic acid construct comprising a nucleic acid molecule that encodes an immunogenic protein comprising at least one epitope of the receptor binding domain A (RBD-A) region of a pandemic influenza A subtype H1 hemagglutinin antigen, wherein said encoded RBD-A region is lacking any N-linked glycosylation site that is present in the RBD-A region of a non-pandemic influenza A subtype H1 hemagglutinin antigen, wherein said immunogenic protein elicits a neutralizing antibody immune response against a homologous pandemic influenza A subtype H1 virus strain and against a heterologous pandemic influenza A subtype H1 virus strain.

33. The immunogen of claim 32, wherein said pandemic influenza A subtype H1 hemagglutinin antigen is selected from the group consisting of a 1918 pandemic influenza A subtype H1 hemagglutinin antigen, a 1976 pandemic influenza A subtype H1 hemagglutinin antigen, and a 2009 pandemic influenza A subtype H1 hemagglutinin antigen.

34-35. (canceled)

36. The immunogen of claim 32, wherein said N-linked glycosylation site is selected from the group consisting of:
(a) an N-linked glycosylation site corresponding to amino acid position 142 of SEQ ID NO:3;
(b) an N-linked glycosylation site corresponding to amino acid position 144 of SEQ ID NO:3;
(c) an N-linked glycosylation site corresponding to amino acid position 172 of SEQ ID NO:3;
(d) an N-linked glycosylation site corresponding to amino acid position 177 of SEQ ID NO:3;
(e) an N-linked glycosylation site corresponding to amino acid position 179 of SEQ ID NO:3; and
(f) an N-linked glycosylation site corresponding to amino acid position 136 of SEQ ID NO:3.

37. The immunogen of claim 32, wherein the immunogenic protein is selected from the group consisting of:
(a) an immunogenic protein comprising at least one region selected from the group consisting of:
(1) amino acids 131-143 from SEQ ID NO:3 or SEQ ID NO:62;
(2) amino acids 170-182 from SEQ ID NO:3 or SEQ ID NO:62;
(3) amino acids 131-146 from SEQ ID NO:3 or SEQ ID NO:62; and
(4) amino acids 257-262 from SEQ ID NO:3 or SEQ ID NO:62; and,
(b) an immunogenic protein comprising:
(1) amino acids 131-143 from SEQ ID NO:3 or SEQ ID NO:62;
(2) amino acids 170-182 from SEQ ID NO:3 or SEQ ID NO:62;
(3) amino acids 205-215 from SEQ ID NO:3 or SEQ ID NO:62; and
(4) amino acids 257-262 from SEQ ID NO:3 or SEQ ID NO:62.

38. (canceled)

39. The immunogen of claim 32, wherein said immunogenic protein comprises at least one epitope from the RBD-A region of a hemagglutinin antigen comprising an amino acid sequence selected from the group consisting of SEQ ID NO:3, SEQ ID NO:7, SEQ ID NO:19, SEQ ID NO:49, SEQ ID NO:51, SEQ ID NO:52, SEQ ID NO:53, SEQ ID NO:54, SEQ ID NO:55, SEQ ID NO:56, SEQ ID NO:57, SEQ ID NO:58, SEQ ID NO:59, SEQ ID NO:60, SEQ ID NO:61, and SEQ ID NO:62.

40. (canceled)

41. The immunogen of claim 32 wherein said immunogenic protein comprises a hemagglutinin antigen comprising an amino acid sequence selected from the group consisting of SEQ ID NO:3, SEQ ID NO:7, SEQ ID NO:19, SEQ ID NO:49, and SEQ ID NO:62.

42-44. (canceled)

45. The immunogen of claim 32, wherein said nucleic acid construct comprises a nucleic acid sequence selected from the group consisting of SEQ ID NO:1, SEQ ID NO:5, SEQ ID NO:17, and SEQ ID NO:63.

46-50. (canceled)

51. A method to elicit a neutralizing antibody immune response against a pandemic influenza A subtype H1 virus comprising administering to a subject an immunogen comprising a nucleic acid molecule encoding a pandemic influenza A subtype H1 hemagglutinin antigen (HA), wherein said HA is heterologous to the virus against which an immune response is being elicited, and wherein said immunogen elicits said immune response.

52. The method of claim 51, wherein said hemagglutinin antigen is selected from the group consisting of influenza A/California/04/2009 HA and influenza A/South Carolina/1/1918 HA.

53. The method of claim 51, wherein said hemagglutinin antigen lacks any N-linked glycosylation site that is present in the receptor binding domain A (RBD-A) region of a hemagglutinin antigen from a non-pandemic influenza A virus.

54. The method of claim 53, wherein said N-linked glycosylation site is selected from the group consisting of:
(a) an N-linked glycosylation site corresponding to amino acid position 142 of SEQ ID NO:3;
(b) an N-linked glycosylation site corresponding to amino acid position 144 of SEQ ID NO:3;
(c) an N-linked glycosylation site corresponding to amino acid position 172 of SEQ ID NO:3;
(d) an N-linked glycosylation site corresponding to amino acid position 177 of SEQ ID NO:3; and,
(e) an N-linked glycosylation site corresponding to amino acid position 179 of SEQ ID NO:3; and
(f) an N-linked glycosylation site corresponding to amino acid position 136 of SEQ ID NO:3.

55. A method of claim 51, wherein said immunogen provides protection against a pandemic influenza A subtype H1 virus.

56. A method to elicit a neutralizing antibody immune response against an influenza A subtype H1 virus in a subject comprising administering to the subject the immunogen of claim 32.

57. A method to protect a subject against a pandemic influenza A subtype H1 virus comprising administering to said subject the immunogen of claim 32.

58. A method to reduce pandemic influenza A subtype H1 virus in an animal reservoir comprising administering to animals in said reservoir the immunogen of claim 32.

59. An immunogen comprising nucleic acid construct VRC 9328.

60-70. (canceled)

71. A method to detect the emergence of a non-pandemic influenza A subtype H1 virus from a pandemic population of influenza A subtype H1 virus, said method comprising:
(a) isolating a biological sample containing influenza A virus; and
(b) testing the hemagglutinin antigen of said virus for the presence of N-linked glycans at positions corresponding to amino acids 136, 142, 144, 172, 177 and 179 of SEQ ID NO:3;
wherein the presence of glycan at any of said positions indicates the emergence of a non-pandemic virus.

The application's sequence listing, which the Patent Office published only in electronic form, follows.

SEQUENCE LISTING (122 sequences)

SEQ ID NO: 1 - DNA, 6127 bp, Influenza A virus
tcgcgcgtttcggtgatgacggtgaaaacctctgacacatgcagctcccggagacggtcacagcttgtctgtaagcggatgccgggagcagacaagcccgtcagggcgcgtcagcgggtgttggcgggtgtcggggctggcttaactatgcggcatcagagcagattgtactgagagtgcaccatatgcggtgtgaaataccgcacagatgcgtaaggagaaaataccgcatcagattggctattggccattgcatacgttgtatccatatcataatatgtacatttatattggctcatgtccaacattaccgccatgttgacattgattattgactagttattaatagtaatcaattacgggaacttccatagcccatatatggagttccgcgttacataacttacgggaatttccaaacctggctgaccgcccaacgacccccgcccattgacgtcaataatgacgtatgttcccatagtaacgccaatagggaacttccattgacgtcaatgggtggagtatttacggtaaactgcccacttgggaatttccaagtgtatcatatgccaagtacgccccctattgacgtcaatgacgggaacttccataagcttgcattatgcccagtacatgaccttatgggaatttcctacttggcagtacatctacgtattagtcatcgctattaccatggtgatgcggttttggcagtacatcaatgggcgtggatagcggtttgactcacgggaacttccaagtctccaccccattgacgtcaatgggagtttgttttgactcaccaaaatcaacgggaattcccaaaatgtcgtaacaactccgccccattgacgcaaatgggcggtaggcgtgtacggtgggaggtctatataagcagagctcgtttagtgaaccgtcagatcgcctggagacgccatccacgctgttttgacctccatagaagacaccgggaccgatccagcctccatcggctcgcatctctccttcacgcgcccgccgccctacctgaggccgccatccacgccggttgagtcgcgttctgccgcctcccgcctgtggtgcctcctgaactgcgtccgccgtctaggtaagtttaaagctcaggtcgagaccgggcctttgtccggcgctcccttggagcctacctagactcagccggctctccacgctttgcctgaccctgcttgctcaactctagttaacggtggagggcagtgtagtctgagcagtactcgttgctgccgcgcgcgccaccagacataatagctgacagactaacagactgttcctttccatgggtcttttctgcagtcaccgtcgtcgacacgtgtgatcagatatcgcggccgctctagagatatcgccaccatggaagccagactgctggtgctgctgtgtgcctttgccgccacaaatgcagatacaatctgtattggctaccacgccaacaatagcaccgataccgtggatacagtgctggagaagaatgtgaccgtgacccactctgtgaatctgctggaggatagccacaatggcaagctgtgtaagctgaaaggaattgcccctctgcagctgggcaaatgtaatattgccggctggctgctgggaaatcctgaatgtgatctgctgctgacagccagcagctggtcttatatcgtggagaccagcaatagcgagaatggcacctgttaccctggcgacttcatcgattacgaggagctgagagaacagctgtctagcgtgtccagcttcgagaagttcgagatcttccctaagacaagcagctggcctaatcacgagacaacaaagggagtgacagccgcctgttcttatgccggagccagctccttttacagaaacctgctgtggctgacaaagaagggcagcagctaccctaagctgtctaagagctacgtgaacaacaagggcaaagaagtgctggtgctgtggggagtgcaccaccctcctacaggaacagatcagcagagcctgtaccagaatgccgatgcctatgtgtctgtgggcagcagcaagtacaacagaagattcacccctgaaattgccgccagacccaaagtgagagatcaggccggcagaatgaattactactggaccctgctggaacctggcgataccatcacatttgaggccaccggaaatctgattgccccttggtatgcctttgccctgaatagaggctctggctctggcatcattacatctgatgcccctgtgcacgactgtaataccaagtgtcagacacctcacggcgccattaatagcagcctgcccttccagaatattcaccctgtgaccatcggcgagtgtcctaagtatgtgaggagcaccaaactgagaatggccaccggcctgagaaatatccctagcatccagagcagaggactgtttggagccatcgccggctttattgagggaggatggaccggaatgatcgatggctggtacggctatcaccaccagaatgagcagggatctggatatgccgccgatcagaagtctacacagaacgccatcgacggcatcacaaacaaggtgaacagcgtgatcgagaagatgaacacccagtttacagctgtgggcaaggagttcaacaacctggagcggagaatcgagaacctgaacaagaaagtggacgacggcttcctggatatttggacctacaatgccgagctgctcgtgctcctggagaatgagagaaccctggacttccacgacagcaatgtgagaaacctgtacgagaaggtgaagagccagctgaagaacaatgccaaggagatcggcaacggctgctttgagttctaccacaagtgtgacgatgcctgtatggagtctgtgagaaacggcacctacgactaccctaagtatagcgaggagagcaagctgaatagagaggagatcgacggcgtgaaactggaaagcatgggcgtgtatcagatcctggccatctattctacagtggcctcttctctggtgctcctggtgtctctgggagccatcagcttttggatgtgtagcaatggcagcctgcagtgcagaatctgtatctgatgaacacgtgggatccagattctgctgtgccttctagttgccagccatctgttgtttgcccctcccccgtgccttccttgaccctggaaggtgccactcccactgtcctttcctaataaaatgaggaaattgcatcgcattgtctgagtaggtgtcattctattctggggggtggggtggggcaggacagcaagggggaggattgggaagacaatagcaggcatgctggggatgcggtgggctctatgggtacccaggtgctgaagaattgacccggttcctcctgggccagaaagaagcaggcacatccccttctctgtgacacaccctgtccacgcccctggttcttagttccagccccactcataggacactcatagctcaggagggctccgccttcaatcccacccgctaaagtacttggagcggtctctccctccctcatcagcccaccaaaccaaacctagcctccaagagtgggaagaaattaaagcaagataggctattaagtgcagagggagagaaaatgcctccaacatgtgaggaagtaatgagagaaatcatagaattttaaggccatgatttaaggccatcatggccttaatcttccgcttcctcgctcactgactcgctgcgctcggtcgttcggctgcggcgagcggtatcagctcactcaaaggcggtaatacggttatccacagaatcaggggataacgcaggaaagaacatgtgagcaaaaggccagcaaaaggccaggaaccgtaaaaaggccgcgttgctggcgtttttccataggctccgcccccctgacgagcatcacaaaaatcgacgctcaagtcagaggtggcgaaacccgacaggactataaagataccaggcgtttccccctggaagctccctcgtgcgctctcctgttccgaccctgccgcttaccggatacctgtccgcctttctcccttcgggaagcgtggcgctttctcatagctcacgctgtaggtatctcagttcggtgtaggtcgttcgctccaagctgggctgtgtgcacgaaccccccgttcagcccgaccgctgcgccttatccggtaactatcgtcttgagtccaacccggtaagacacgacttatcgccactggcagcagccactggtaacaggattagcagagcgaggtatgtaggcggtgctacagagttcttgaagtggtggcctaactacggctacactagaagaacagtatttggtatctgcgctctgctgaagccagttaccttcggaaaaagagttggtagctcttgatccggcaaacaaaccaccgctggtagcggtggtttttttgtttgcaagcagcagattacgcgcagaaaaaaaggatctcaagaagatcctttgatcttttctacggggtctgacgctcagtggaacgaaaactcacgttaagggattttggtcatgagattatcaaaaaggatcttcacctagatccttttaaattaaaaatgaagttttaaatcaatctaaagtatatatgagtaaacttggtctgacagttaccaatgcttaatcagtgaggcacctatctcagcgatctgtctatttcgttcatccatagttgcctgactcggggggggggggcgctgaggtctgcctcgtgaagaaggtgttgctgactcataccaggcctgaatcgccccatcatccagccagaaagtgagggagccacggttgatgagagctttgttgtaggtggaccagttggtgattttgaacttttgctttgccacggaacggtctgcgttgtcgggaagatgcgtgatctgatccttcaactcagcaaaagttcgatttattcaacaaagccgccgtcccgtcaagtcagcgtaatgctctgccagtgttacaaccaattaaccaattctgattagaaaaactcatcgagcatcaaatgaaactgcaatttattcatatcaggattatcaataccatatttttgaaaaagccgtttctgtaatgaaggagaaaactcaccgaggcagttccataggatggcaagatcctggtatcggtctgcgattccgactcgtccaacatcaatacaacctattaatttcccctcgtcaaaaataaggttatcaagtgagaaatcaccatgagtgacgactgaatccggtgagaatggcaaaagcttatgcatttctttccagacttgttcaacaggccagccattacgctcgtcatcaaaatcactcgcatcaaccaaaccgttattcattcgtgattgcgcctgagcgagacgaaatacgcgatcgctgttaaaaggacaattacaaacaggaatcgaatgcaaccggcgcaggaacactgccagcgcatcaacaatattttcacctgaatcaggatattcttctaatacctggaatgctgttttcccggggatcgcagtggtgagtaaccatgcatcatcaggagtacggataaaatgcttgatggtcggaagaggcataaattccgtcagccagtttagtctgaccatctcatctgtaacatcattggcaacgctacctttgccatgtttcagaaacaactctggcgcatcgggcttcccatacaatcgatagattgtcgcacctgattgcccgacattatcgcgagcccatttatacccatataaatcagcatccatgttggaatttaatcgcggcctcgagcaagacgtttcccgttgaatatggctcataacaccccttgtattactgtttatgtaagcagacagttttattgttcatgatgatatatttttatcttgtgcaatgtaacatcagagattttgagacacaacgtggctttccccccccccccattattgaagcatttatcagggttattgtctcatgagcggatacatatttgaatgtatttagaaaaataaacaaataggggttccgcgcacatttccccgaaaagtgccacctgacgtctaagaaaccattattatcatgacattaacctataaaaataggcgtatcacgaggccctttcgtc

SEQ ID NO: 2 - DNA, 1698 bp, Influenza A virus
  CDS (1)..(1698)
atggaagccagactgctggtgctgctgtgtgcctttgccgccacaaatgcagatacaatctgtattggctaccacgccaacaatagcaccgataccgtggatacagtgctggagaagaatgtgaccgtgacccactctgtgaatctgctggaggatagccacaatggcaagctgtgtaagctgaaaggaattgcccctctgcagctgggcaaatgtaatattgccggctggctgctgggaaatcctgaatgtgatctgctgctgacagccagcagctggtcttatatcgtggagaccagcaatagcgagaatggcacctgttaccctggcgacttcatcgattacgaggagctgagagaacagctgtctagcgtgtccagcttcgagaagttcgagatcttccctaagacaagcagctggcctaatcacgagacaacaaagggagtgacagccgcctgttcttatgccggagccagctccttttacagaaacctgctgtggctgacaaagaagggcagcagctaccctaagctgtctaagagctacgtgaacaacaagggcaaagaagtgctggtgctgtggggagtgcaccaccctcctacaggaacagatcagcagagcctgtaccagaatgccgatgcctatgtgtctgtgggcagcagcaagtacaacagaagattcacccctgaaattgccgccagacccaaagtgagagatcaggccggcagaatgaattactactggaccctgctggaacctggcgataccatcacatttgaggccaccggaaatctgattgccccttggtatgcctttgccctgaatagaggctctggctctggcatcattacatctgatgcccctgtgcacgactgtaataccaagtgtcagacacctcacggcgccattaatagcagcctgcccttccagaatattcaccctgtgaccatcggcgagtgtcctaagtatgtgaggagcaccaaactgagaatggccaccggcctgagaaatatccctagcatccagagcagaggactgtttggagccatcgccggctttattgagggaggatggaccggaatgatcgatggctggtacggctatcaccaccagaatgagcagggatctggatatgccgccgatcagaagtctacacagaacgccatcgacggcatcacaaacaaggtgaacagcgtgatcgagaagatgaacacccagtttacagctgtgggcaaggagttcaacaacctggagcggagaatcgagaacctgaacaagaaagtggacgacggcttcctggatatttggacctacaatgccgagctgctcgtgctcctggagaatgagagaaccctggacttccacgacagcaatgtgagaaacctgtacgagaaggtgaagagccagctgaagaacaatgccaaggagatcggcaacggctgctttgagttctaccacaagtgtgacgatgcctgtatggagtctgtgagaaacggcacctacgactaccctaagtatagcgaggagagcaagctgaatagagaggagatcgacggcgtgaaactggaaagcatgggcgtgtatcagatcctggccatctattctacagtggcctcttctctggtgctcctggtgtctctgggagccatcagcttttggatgtgtagcaatggcagcctgcagtgcagaatctgtatc

SEQ ID NO: 3 - protein, 566 aa, Influenza A virus
MEARLLVLLCAFAATNADTICIGYHANNSTDTVDTVLEKNVTVTHSVNLLEDSHNGKLCKLKGIAPLQLGKCNIAGWLLGNPECDLLLTASSWSYIVETSNSENGTCYPGDFIDYEELREQLSSVSSFEKFEIFPKTSSWPNHETTKGVTAACSYAGASSFYRNLLWLTKKGSSYPKLSKSYVNNKGKEVLVLWGVHHPPTGTDQQSLYQNADAYVSVGSSKYNRRFTPEIAARPKVRDQAGRMNYYWTLLEPGDTITFEATGNLIAPWYAFALNRGSGSGIITSDAPVHDCNTKCQTPHGAINSSLPFQNIHPVTIGECPKYVRSTKLRMATGLRNIPSIQSRGLFGAIAGFIEGGWTGMIDGWYGYHHQNEQGSGYAADQKSTQNAIDGITNKVNSVIEKMNTQFTAVGKEFNNLERRIENLNKKVDDGFLDIWTYNAELLVLLENERTLDFHDSNVRNLYEKVKSQLKNNAKEIGNGCFEFYHKCDDACMESVRNGTYDYPKYSEESKLNREEIDGVKLESMGVYQILAIYSTVASSLVLLVSLGAISFWMCSNGSLQCRICI

SEQ ID NO: 4 - DNA, 6127 bp, Influenza A virus
gacgaaagggcctcgtgatacgcctatttttataggttaatgtcatgataataatggtttcttagacgtcaggtggcacttttcggggaaatgtgcgcggaacccctatttgtttatttttctaaatacattcaaatatgtatccgctcatgagacaataaccctgataaatgcttcaataatggggggggggggaaagccacgttgtgtctcaaaatctctgatgttacattgcacaagataaaaatatatcatcatgaacaataaaactgtctgcttacataaacagtaatacaaggggtgttatgagccatattcaacgggaaacgtcttgctcgaggccgcgattaaattccaacatggatgctgatttatatgggtataaatgggctcgcgataatgtcgggcaatcaggtgcgacaatctatcgattgtatgggaagcccgatgcgccagagttgtttctgaaacatggcaaaggtagcgttgccaatgatgttacagatgagatggtcagactaaactggctgacggaatttatgcctcttccgaccatcaagcattttatccgtactcctgatgatgcatggttactcaccactgcgatccccgggaaaacagcattccaggtattagaagaatatcctgattcaggtgaaaatattgttgatgcgctggcagtgttcctgcgccggttgcattcgattcctgtttgtaattgtccttttaacagcgatcgcgtatttcgtctcgctcaggcgcaatcacgaatgaataacggtttggttgatgcgagtgattttgatgacgagcgtaatggctggcctgttgaacaagtctggaaagaaatgcataagcttttgccattctcaccggattcagtcgtcactcatggtgatttctcacttgataaccttatttttgacgaggggaaattaataggttgtattgatgttggacgagtcggaatcgcagaccgataccaggatcttgccatcctatggaactgcctcggtgagttttctccttcattacagaaacggctttttcaaaaatatggtattgataatcctgatatgaataaattgcagtttcatttgatgctcgatgagtttttctaatcagaattggttaattggttgtaacactggcagagcattacgctgacttgacgggacggcggctttgttgaataaatcgaacttttgctgagttgaaggatcagatcacgcatcttcccgacaacgcagaccgttccgtggcaaagcaaaagttcaaaatcaccaactggtccacctacaacaaagctctcatcaaccgtggctccctcactttctggctggatgatggggcgattcaggcctggtatgagtcagcaacaccttcttcacgaggcagacctcagcgccccccccccccgagtcaggcaactatggatgaacgaaatagacagatcgctgagataggtgcctcactgattaagcattggtaactgtcagaccaagtttactcatatatactttagattgatttaaaacttcatttttaatttaaaaggatctaggtgaagatcctttttgataatctcatgaccaaaatcccttaacgtgagttttcgttccactgagcgtcagaccccgtagaaaagatcaaaggatcttcttgagatcctttttttctgcgcgtaatctgctgcttgcaaacaaaaaaaccaccgctaccagcggtggtttgtttgccggatcaagagctaccaactctttttccgaaggtaactggcttcagcagagcgcagataccaaatactgttcttctagtgtagccgtagttaggccaccacttcaagaactctgtagcaccgcctacatacctcgctctgctaatcctgttaccagtggctgctgccagtggcgataagtcgtgtcttaccgggttggactcaagacgatagttaccggataaggcgcagcggtcgggctgaacggggggttcgtgcacacagcccagcttggagcgaacgacctacaccgaactgagatacctacagcgtgagctatgagaaagcgccacgcttcccgaagggagaaaggcggacaggtatccggtaagcggcagggtcggaacaggagagcgcacgagggagcttccagggggaaacgcctggtatctttatagtcctgtcgggtttcgccacctctgacttgagcgtcgatttttgtgatgctcgtcaggggggcggagcctatggaaaaacgccagcaacgcggcctttttacggttcctggccttttgctggccttttgctcacatgttctttcctgcgttatcccctgattctgtggataaccgtattaccgcctttgagtgagctgataccgctcgccgcagccgaacgaccgagcgcagcgagtcagtgagcgaggaagcggaagattaaggccatgatggccttaaatcatggccttaaaattctatgatttctctcattacttcctcacatgttggaggcattttctctccctctgcacttaatagcctatcttgctttaatttcttcccactcttggaggctaggtttggtttggtgggctgatgagggagggagagaccgctccaagtactttagcgggtgggattgaaggcggagccctcctgagctatgagtgtcctatgagtggggctggaactaagaaccaggggcgtggacagggtgtgtcacagagaaggggatgtgcctgcttctttctggcccaggaggaaccgggtcaattcttcagcacctgggtacccatagagcccaccgcatccccagcatgcctgctattgtcttcccaatcctcccccttgctgtcctgccccaccccaccccccagaatagaatgacacctactcagacaatgcgatgcaatttcctcattttattaggaaaggacagtgggagtggcaccttccagggtcaaggaaggcacgggggaggggcaaacaacagatggctggcaactagaaggcacagcagaatctggatcccacgtgttcatcagatacagattctgcactgcaggctgccattgctacacatccaaaagctgatggctcccagagacaccaggagcaccagagaagaggccactgtagaatagatggccaggatctgatacacgcccatgctttccagtttcacgccgtcgatctcctctctattcagcttgctctcctcgctatacttagggtagtcgtaggtgccgtttctcacagactccatacaggcatcgtcacacttgtggtagaactcaaagcagccgttgccgatctccttggcattgttcttcagctggctcttcaccttctcgtacaggtttctcacattgctgtcgtggaagtccagggttctctcattctccaggagcacgagcagctcggcattgtaggtccaaatatccaggaagccgtcgtccactttcttgttcaggttctcgattctccgctccaggttgttgaactccttgcccacagctgtaaactgggtgttcatcttctcgatcacgctgttcaccttgtttgtgatgccgtcgatggcgttctgtgtagacttctgatcggcggcatatccagatccctgctcattctggtggtgatagccgtaccagccatcgatcattccggtccatcctccctcaataaagccggcgatggctccaaacagtcctctgctctggatgctagggatatttctcaggccggtggccattctcagtttggtgctcctcacatacttaggacactcgccgatggtcacagggtgaatattctggaagggcaggctgctattaatggcgccgtgaggtgtctgacacttggtattacagtcgtgcacaggggcatcagatgtaatgatgccagagccagagcctctattcagggcaaaggcataccaaggggcaatcagatttccggtggcctcaaatgtgatggtatcgccaggttccagcagggtccagtagtaattcattctgccggcctgatctctcactttgggtctggcggcaatttcaggggtgaatcttctgttgtacttgctgctgcccacagacacataggcatcggcattctggtacaggctctgctgatctgttcctgtaggagggtggtgcactccccacagcaccagcacttctttgcccttgttgttcacgtagctcttagacagcttagggtagctgctgcccttctttgtcagccacagcaggtttctgtaaaaggagctggctccggcataagaacaggcggctgtcactccctttgttgtctcgtgattaggccagctgcttgtcttagggaagatctcgaacttctcgaagctggacacgctagacagctgttctctcagctcctcgtaatcgatgaagtcgccagggtaacaggtgccattctcgctattgctggtctccacgatataagaccagctgctggctgtcagcagcagatcacattcaggatttcccagcagccagccggcaatattacatttgcccagctgcagaggggcaattcctttcagcttacacagcttgccattgtggctatcctccagcagattcacagagtgggtcacggtcacattcttctccagcactgtatccacggtatcggtgctattgttggcgtggtagccaatacagattgtatctgcatttgtggcggcaaaggcacacagcagcaccagcagtctggcttccatggtggcgatatctctagagcggccgcgatatctgatcacacgtgtcgacgacggtgactgcagaaaagacccatggaaaggaacagtctgttagtctgtcagctattatgtctggtggcgcgcgcggcagcaacgagtactgctcagactacactgccctccaccgttaactagagttgagcaagcagggtcaggcaaagcgtggagagccggctgagtctaggtaggctccaagggagcgccggacaaaggcccggtctcgacctgagctttaaacttacctagacggcggacgcagttcaggaggcaccacaggcgggaggcggcagaacgcgactcaaccggcgtggatggcggcctcaggtagggcggcgggcgcgtgaaggagagatgcgagccgatggaggctggatcggtcccggtgtcttctatggaggtcaaaacagcgtggatggcgtctccaggcgatctgacggttcactaaacgagctctgcttatatagacctcccaccgtacacgcctaccgcccatttgcgtcaatggggcggagttgttacgacattttgggaattcccgttgattttggtgagtcaaaacaaactcccattgacgtcaatggggtggagacttggaagttcccgtgagtcaaaccgctatccacgcccattgatgtactgccaaaaccgcatcaccatggtaatagcgatgactaatacgtagatgtactgccaagtaggaaattcccataaggtcatgtactgggcataatgcaagcttatggaagttcccgtcattgacgtcaatagggggcgtacttggcatatgatacacttggaaattcccaagtgggcagtttaccgtaaatactccacccattgacgtcaatggaagttccctattggcgttactatgggaacatacgtcattattgacgtcaatgggcgggggtcgttgggcggtcagccaggtttggaaattcccgtaagttatgtaacgcggaactccatatatgggctatggaagttcccgtaattgattactattaataactagtcaataatcaatgtcaacatggcggtaatgttggacatgagccaatataaatgtacatattatgatatggatacaacgtatgcaatggccaatagccaatctgatgcggtattttctccttacgcatctgtgcggtatttcacaccgcatatggtgcactctcagtacaatctgctctgatgccgcatagttaagccagccccgacacccgccaacacccgctgacgcgccctgacgggcttgtctgctcccggcatccgcttacagacaagctgtgaccgtctccgggagctgcatgtgtcagaggttttcaccgtcatcaccgaaacgcgcga

SEQ ID NO: 5 - DNA, 6114 bp, Influenza A virus
tcgcgcgtttcggtgatgacggtgaaaacctctgacacatgcagctcccggagacggtcacagcttgtctgtaagcggatgccgggagcagacaagcccgtcagggcgcgtcagcgggtgttggcgggtgtcggggctggcttaactatgcggcatcagagcagattgtactgagagtgcaccatatgcggtgtgaaataccgcacagatgcgtaaggagaaaataccgcatcagattggctattggccattgcatacgttgtatccatatcataatatgtacatttatattggctcatgtccaacattaccgccatgttgacattgattattgactagttattaatagtaatcaattacgggaacttccatagcccatatatggagttccgcgttacataacttacgggaatttccaaacctggctgaccgcccaacgacccccgcccattgacgtcaataatgacgtatgttcccatagtaacgccaatagggaacttccattgacgtcaatgggtggagtatttacggtaaactgcccacttgggaatttccaagtgtatcatatgccaagtacgccccctattgacgtcaatgacgggaacttccataagcttgcattatgcccagtacatgaccttatgggaatttcctacttggcagtacatctacgtattagtcatcgctattaccatggtgatgcggttttggcagtacatcaatgggcgtggatagcggtttgactcacgggaacttccaagtctccaccccattgacgtcaatgggagtttgttttgactcaccaaaatcaacgggaattcccaaaatgtcgtaacaactccgccccattgacgcaaatgggcggtaggcgtgtacggtgggaggtctatataagcagagctcgtttagtgaaccgtcagatcgcctggagacgccatccacgctgttttgacctccatagaagacaccgggaccgatccagcctccatcggctcgcatctctccttcacgcgcccgccgccctacctgaggccgccatccacgccggttgagtcgcgttctgccgcctcccgcctgtggtgcctcctgaactgcgtccgccgtctaggtaagtttaaagctcaggtcgagaccgggcctttgtccggcgctcccttggagcctacctagactcagccggctctccacgctttgcctgaccctgcttgctcaactctagttaacggtggagggcagtgtagtctgagcagtactcgttgctgccgcgcgcgccaccagacataatagctgacagactaacagactgttcctttccatgggtcttttctgcagtcaccgtcgtcgacacgtgtgatcagatatcgcggccgctctagagatatcgccaccatggaagccagactgctggtgctgctgtgtgcctttgccgccacaaatgcagatacaatctgtattggctaccacgccaacaatagcaccgataccgtggatacagtgctggagaagaatgtgaccgtgacccactctgtgaatctgctggaggatagccacaatggcaagctgtgtaagctgaaaggaattgcccctctgcagctgggcaaatgtaatattgccggctggctgctgggaaatcctgaatgtgatctgctgctgacagccagcagctggtcttatatcgtggagaccagcaatagcgagaatggcacctgttaccctggcgacttcatcgattacgaggagctgagagaacagctgtctagcgtgtccagcttcgagaagttcgagatcttccctaagacaagcagctggcctaatcacgagacaacaaagggagtgacagccgcctgttcttatgccggagccagctccttttacagaaacctgctgtggctgacaaagaagggcagcagctaccctaagctgtctaagagctacgtgaacaacaagggcaaagaagtgctggtgctgtggggagtgcaccaccctcctacaggaacagatcagcagagcctgtaccagaatgccgatgcctatgtgtctgtgggcagcagcaagtacaacagaagattcacccctgaaattgccgccagacccaaagtgagagatcaggccggcagaatgaattactactggaccctgctggaacctggcgataccatcacatttgaggccaccggaaatctgattgccccttggtatgcctttgccctgaatagaggctctggctctggcatcattacatctgatgcccctgtgcacgactgtaataccaagtgtcagacacctcacggcgccattaatagcagcctgcccttccagaatattcaccctgtgaccatcggcgagtgtcctaagtatgtgaggagcaccaaactgagaatggccaccggcctgagaaatatccctcagagagagaccagaggactgtttggagccatcgccggctttattgagggaggatggaccggaatgatcgatggctggtacggctatcaccaccagaatgagcagggatctggatatgccgccgatcagaagtctacacagaacgccatcgacggcatcacaaacaaggtgaacagcgtgatcgagaagatgaacacccagtttacagctgtgggcaaggagttcaacaacctggagcggagaatcgagaacctgaacaagaaagtggacgacggcttcctggatatttggacctacaatgccgagctgctcgtgctcctggagaatgagagaaccctggacttccacgacagcaatgtgagaaacctgtacgagaaggtgaagagccagctgaagaacaatgccaaggagatcggcaacggctgctttgagttctaccacaagtgtgacgatgcctgtatggagtctgtgagaaacggcacctacgactaccctaagtatagcgaggagagcaagctgaatagagaggagatcagaagcctggtgcctagaggatctcctggcagcggatatattcctgaggcccctagagatggacaggcctatgtgagaaaggatggcgaatgggtgctgctgtctacatttctgggacaccaccatcaccaccattgatgaacacgtgggatccagatctgctgtgccttctagttgccagccatctgttgtttgcccctcccccgtgccttccttgaccctggaaggtgccactcccactgtcctttcctaataaaatgaggaaattgcatcgcattgtctgagtaggtgtcattctattctggggggtggggtggggcaggacagcaagggggaggattgggaagacaatagcaggcatgctggggatgcggtgggctctatgggtacccaggtgctgaagaattgacccggttcctcctgggccagaaagaagcaggcacatccccttctctgtgacacaccctgtccacgcccctggttcttagttccagccccactcataggacactcatagctcaggagggctccgccttcaatcccacccgctaaagtacttggagcggtctctccctccctcatcagcccaccaaaccaaacctagcctccaagagtgggaagaaattaaagcaagataggctattaagtgcagagggagagaaaatgcctccaacatgtgaggaagtaatgagagaaatcatagaattttaaggccatgatttaaggccatcatggccttaatcttccgcttcctcgctcactgactcgctgcgctcggtcgttcggctgcggcgagcggtatcagctcactcaaaggcggtaatacggttatccacagaatcaggggataacgcaggaaagaacatgtgagcaaaaggccagcaaaaggccaggaaccgtaaaaaggccgcgttgctggcgtttttccataggctccgcccccctgacgagcatcacaaaaatcgacgctcaagtcagaggtggcgaaacccgacaggactataaagataccaggcgtttccccctggaagctccctcgtgcgctctcctgttccgaccctgccgcttaccggatacctgtccgcctttctcccttcgggaagcgtggcgctttctcatagctcacgctgtaggtatctcagttcggtgtaggtcgttcgctccaagctgggctgtgtgcacgaaccccccgttcagcccgaccgctgcgccttatccggtaactatcgtcttgagtccaacccggtaagacacgacttatcgccactggcagcagccactggtaacaggattagcagagcgaggtatgtaggcggtgctacagagttcttgaagtggtggcctaactacggctacactagaagaacagtatttggtatctgcgctctgctgaagccagttaccttcggaaaaagagttggtagctcttgatccggcaaacaaaccaccgctggtagcggtggtttttttgtttgcaagcagcagattacgcgcagaaaaaaaggatctcaagaagatcctttgatcttttctacggggtctgacgctcagtggaacgaaaactcacgttaagggattttggtcatgagattatcaaaaaggatcttcacctagatccttttaaattaaaaatgaagttttaaatcaatctaaagtatatatgagtaaacttggtctgacagttaccaatgcttaatcagtgaggcacctatctcagcgatctgtctatttcgttcatccatagttgcctgactcggggggggggggcgctgaggtctgcctcgtgaagaaggtgttgctgactcataccaggcctgaatcgccccatcatccagccagaaagtgagggagccacggttgatgagagctttgttgtaggtggaccagttggtgattttgaacttttgctttgccacggaacggtctgcgttgtcgggaagatgcgtgatctgatccttcaactcagcaaaagttcgatttattcaacaaagccgccgtcccgtcaagtcagcgtaatgctctgccagtgttacaaccaattaaccaattctgattagaaaaactcatcgagcatcaaatgaaactgcaatttattcatatcaggattatcaataccatatttttgaaaaagccgtttctgtaatgaaggagaaaactcaccgaggcagttccataggatggcaagatcctggtatcggtctgcgattccgactcgtccaacatcaatacaacctattaatttcccctcgtcaaaaataaggttatcaagtgagaaatcaccatgagtgacgactgaatccggtgagaatggcaaaagcttatgcatttctttccagacttgttcaacaggccagccattacgctcgtcatcaaaatcactcgcatcaaccaaaccgttattcattcgtgattgcgcctgagcgagacgaaatacgcgatcgctgttaaaaggacaattacaaacaggaatcgaatgcaaccggcgcaggaacactgccagcgcatcaacaatattttcacctgaatcaggatattcttctaatacctggaatgctgttttcccggggatcgcagtggtgagtaaccatgcatcatcaggagtacggataaaatgcttgatggtcggaagaggcataaattccgtcagccagtttagtctgaccatctcatctgtaacatcattggcaacgctacctttgccatgtttcagaaacaactctggcgcatcgggcttcccatacaatcgatagattgtcgcacctgattgcccgacattatcgcgagcccatttatacccatataaatcagcatccatgttggaatttaatcgcggcctcgagcaagacgtttcccgttgaatatggctcataacaccccttgtattactgtttatgtaagcagacagttttattgttcatgatgatatatttttatcttgtgcaatgtaacatcagagattttgagacacaacgtggctttccccccccccccattattgaagcatttatcagggttattgtctcatgagcggatacatatttgaatgtatttagaaaaataaacaaataggggttccgcgcacatttccccgaaaagtgccacctgacgtctaagaaaccattattatcatgacattaacctataaaaataggcgtatcacgaggccctttcgtc

SEQ ID NO: 6 - DNA, 1686 bp, Influenza A virus
  CDS (1)..(1686)
atggaagccagactgctggtgctgctgtgtgcctttgccgccacaaatgcagatacaatctgtattggctaccacgccaacaatagcaccgataccgtggatacagtgctggagaagaatgtgaccgtgacccactctgtgaatctgctggaggatagccacaatggcaagctgtgtaagctgaaaggaattgcccctctgcagctgggcaaatgtaatattgccggctggctgctgggaaatcctgaatgtgatctgctgctgacagccagcagctggtcttatatcgtggagaccagcaatagcgagaatggcacctgttaccctggcgacttcatcgattacgaggagctgagagaacagctgtctagcgtgtccagcttcgagaagttcgagatcttccctaagacaagcagctggcctaatcacgagacaacaaagggagtgacagccgcctgttcttatgccggagccagctccttttacagaaacctgctgtggctgacaaagaagggcagcagctaccctaagctgtctaagagctacgtgaacaacaagggcaaagaagtgctggtgctgtggggagtgcaccaccctcctacaggaacagatcagcagagcctgtaccagaatgccgatgcctatgtgtctgtgggcagcagcaagtacaacagaagattcacccctgaaattgccgccagacccaaagtgagagatcaggccggcagaatgaattactactggaccctgctggaacctggcgataccatcacatttgaggccaccggaaatctgattgccccttggtatgcctttgccctgaatagaggctctggctctggcatcattacatctgatgcccctgtgcacgactgtaataccaagtgtcagacacctcacggcgccattaatagcagcctgcccttccagaatattcaccctgtgaccatcggcgagtgtcctaagtatgtgaggagcaccaaactgagaatggccaccggcctgagaaatatccctcagagagagaccagaggactgtttggagccatcgccggctttattgagggaggatggaccggaatgatcgatggctggtacggctatcaccaccagaatgagcagggatctggatatgccgccgatcagaagtctacacagaacgccatcgacggcatcacaaacaaggtgaacagcgtgatcgagaagatgaacacccagtttacagctgtgggcaaggagttcaacaacctggagcggagaatcgagaacctgaacaagaaagtggacgacggcttcctggatatttggacctacaatgccgagctgctcgtgctcctggagaatgagagaaccctggacttccacgacagcaatgtgagaaacctgtacgagaaggtgaagagccagctgaagaacaatgccaaggagatcggcaacggctgctttgagttctaccacaagtgtgacgatgcctgtatggagtctgtgagaaacggcacctacgactaccctaagtatagcgaggagagcaagctgaatagagaggagatcagaagcctggtgcctagaggatctcctggcagcggatatattcctgaggcccctagagatggacaggcctatgtgagaaaggatggcgaatgggtgctgctgtctacatttctgggacaccaccatcaccaccat

SEQ ID NO: 7 - protein, 562 aa, Influenza A virus
MEARLLVLLCAFAATNADTICIGYHANNSTDTVDTVLEKNVTVTHSVNLLEDSHNGKLCKLKGIAPLQLGKCNIAGWLLGNPECDLLLTASSWSYIVETSNSENGTCYPGDFIDYEELREQLSSVSSFEKFEIFPKTSSWPNHETTKGVTAACSYAGASSFYRNLLWLTKKGSSYPKLSKSYVNNKGKEVLVLWGVHHPPTGTDQQSLYQNADAYVSVGSSKYNRRFTPEIAARPKVRDQAGRMNYYWTLLEPGDTITFEATGNLIAPWYAFALNRGSGSGIITSDAPVHDCNTKCQTPHGAINSSLPFQNIHPVTIGECPKYVRSTKLRMATGLRNIPQRETRGLFGAIAGFIEGGWTGMIDGWYGYHHQNEQGSGYAADQKSTQNAIDGITNKVNSVIEKMNTQFTAVGKEFNNLERRIENLNKKVDDGFLDIWTYNAELLVLLENERTLDFHDSNVRNLYEKVKSQLKNNAKEIGNGCFEFYHKCDDACMESVRNGTYDYPKYSEESKLNREEIRSLVPRGSPGSGYIPEAPRDGQAYVRKDGEWVLLSTFLGHHHHHH

SEQ ID NO: 8 - DNA, 6114 bp, Influenza A virus
gacgaaagggcctcgtgatacgcctatttttataggttaatgtcatgataataatggtttcttagacgtcaggtggcacttttcggggaaatgtgcgcggaacccctatttgtttatttttctaaatacattcaaatatgtatccgctcatgagacaataaccctgataaatgcttcaataatggggggggggggaaagccacgttgtgtctcaaaatctctgatgttacattgcacaagataaaaatatatcatcatgaacaataaaactgtctgcttacataaacagtaatacaaggggtgttatgagccatattcaacgggaaacgtcttgctcgaggccgcgattaaattccaacatggatgctgatttatatgggtataaatgggctcgcgataatgtcgggcaatcaggtgcgacaatctatcgattgtatgggaagcccgatgcgccagagttgtttctgaaacatggcaaaggtagcgttgccaatgatgttacagatgagatggtcagactaaactggctgacggaatttatgcctcttccgaccatcaagcattttatccgtactcctgatgatgcatggttactcaccactgcgatccccgggaaaacagcattccaggtattagaagaatatcctgattcaggtgaaaatattgttgatgcgctggcagtgttcctgcgccggttgcattcgattcctgtttgtaattgtccttttaacagcgatcgcgtatttcgtctcgctcaggcgcaatcacgaatgaataacggtttggttgatgcgagtgattttgatgacgagcgtaatggctggcctgttgaacaagtctggaaagaaatgcataagcttttgccattctcaccggattcagtcgtcactcatggtgatttctcacttgataaccttatttttgacgaggggaaattaataggttgtattgatgttggacgagtcggaatcgcagaccgataccaggatcttgccatcctatggaactgcctcggtgagttttctccttcattacagaaacggctttttcaaaaatatggtattgataatcctgatatgaataaattgcagtttcatttgatgctcgatgagtttttctaatcagaattggttaattggttgtaacactggcagagcattacgctgacttgacgggacggcggctttgttgaataaatcgaacttttgctgagttgaaggatcagatcacgcatcttcccgacaacgcagaccgttccgtggcaaagcaaaagttcaaaatcaccaactggtccacctacaacaaagctctcatcaaccgtggctccctcactttctggctggatgatggggcgattcaggcctggtatgagtcagcaacaccttcttcacgaggcagacctcagcgccccccccccccgagtcaggcaactatggatgaacgaaatagacagatcgctgagataggtgcctcactgattaagcattggtaactgtcagaccaagtttactcatatatactttagattgatttaaaacttcatttttaatttaaaaggatctaggtgaagatcctttttgataatctcatgaccaaaatcccttaacgtgagttttcgttccactgagcgtcagaccccgtagaaaagatcaaaggatcttcttgagatcctttttttctgcgcgtaatctgctgcttgcaaacaaaaaaaccaccgctaccagcggtggtttgtttgccggatcaagagctaccaactctttttccgaaggtaactggcttcagcagagcgcagataccaaatactgttcttctagtgtagccgtagttaggccaccacttcaagaactctgtagcaccgcctacatacctcgctctgctaatcctgttaccagtggctgctgccagtggcgataagtcgtgtcttaccgggttggactcaagacgatagttaccggataaggcgcagcggtcgggctgaacggggggttcgtgcacacagcccagcttggagcgaacgacctacaccgaactgagatacctacagcgtgagctatgagaaagcgccacgcttcccgaagggagaaaggcggacaggtatccggtaagcggcagggtcggaacaggagagcgcacgagggagcttccagggggaaacgcctggtatctttatagtcctgtcgggtttcgccacctctgacttgagcgtcgatttttgtgatgctcgtcaggggggcggagcctatggaaaaacgccagcaacgcggcctttttacggttcctggccttttgctggccttttgctcacatgttctttcctgcgttatcccctgattctgtggataaccgtattaccgcctttgagtgagctgataccgctcgccgcagccgaacgaccgagcgcagcgagtcagtgagcgaggaagcggaagattaaggccatgatggccttaaatcatggccttaaaattctatgatttctctcattacttcctcacatgttggaggcattttctctccctctgcacttaatagcctatcttgctttaatttcttcccactcttggaggctaggtttggtttggtgggctgatgagggagggagagaccgctccaagtactttagcgggtgggattgaaggcggagccctcctgagctatgagtgtcctatgagtggggctggaactaagaaccaggggcgtggacagggtgtgtcacagagaaggggatgtgcctgcttctttctggcccaggaggaaccgggtcaattcttcagcacctgggtacccatagagcccaccgcatccccagcatgcctgctattgtcttcccaatcctcccccttgctgtcctgccccaccccaccccccagaatagaatgacacctactcagacaatgcgatgcaatttcctcattttattaggaaaggacagtgggagtggcaccttccagggtcaaggaaggcacgggggaggggcaaacaacagatggctggcaactagaaggcacagcagatctggatcccacgtgttcatcaatggtggtgatggtggtgtcccagaaatgtagacagcagcacccattcgccatcctttctcacataggcctgtccatctctaggggcctcaggaatatatccgctgccaggagatcctctaggcaccaggcttctgatctcctctctattcagcttgctctcctcgctatacttagggtagtcgtaggtgccgtttctcacagactccatacaggcatcgtcacacttgtggtagaactcaaagcagccgttgccgatctccttggcattgttcttcagctggctcttcaccttctcgtacaggtttctcacattgctgtcgtggaagtccagggttctctcattctccaggagcacgagcagctcggcattgtaggtccaaatatccaggaagccgtcgtccactttcttgttcaggttctcgattctccgctccaggttgttgaactccttgcccacagctgtaaactgggtgttcatcttctcgatcacgctgttcaccttgtttgtgatgccgtcgatggcgttctgtgtagacttctgatcggcggcatatccagatccctgctcattctggtggtgatagccgtaccagccatcgatcattccggtccatcctccctcaataaagccggcgatggctccaaacagtcctctggtctctctctgagggatatttctcaggccggtggccattctcagtttggtgctcctcacatacttaggacactcgccgatggtcacagggtgaatattctggaagggcaggctgctattaatggcgccgtgaggtgtctgacacttggtattacagtcgtgcacaggggcatcagatgtaatgatgccagagccagagcctctattcagggcaaaggcataccaaggggcaatcagatttccggtggcctcaaatgtgatggtatcgccaggttccagcagggtccagtagtaattcattctgccggcctgatctctcactttgggtctggcggcaatttcaggggtgaatcttctgttgtacttgctgctgcccacagacacataggcatcggcattctggtacaggctctgctgatctgttcctgtaggagggtggtgcactccccacagcaccagcacttctttgcccttgttgttcacgtagctcttagacagcttagggtagctgctgcccttctttgtcagccacagcaggtttctgtaaaaggagctggctccggcataagaacaggcggctgtcactccctttgttgtctcgtgattaggccagctgcttgtcttagggaagatctcgaacttctcgaagctggacacgctagacagctgttctctcagctcctcgtaatcgatgaagtcgccagggtaacaggtgccattctcgctattgctggtctccacgatataagaccagctgctggctgtcagcagcagatcacattcaggatttcccagcagccagccggcaatattacatttgcccagctgcagaggggcaattcctttcagcttacacagcttgccattgtggctatcctccagcagattcacagagtgggtcacggtcacattcttctccagcactgtatccacggtatcggtgctattgttggcgtggtagccaatacagattgtatctgcatttgtggcggcaaaggcacacagcagcaccagcagtctggcttccatggtggcgatatctctagagcggccgcgatatctgatcacacgtgtcgacgacggtgactgcagaaaagacccatggaaaggaacagtctgttagtctgtcagctattatgtctggtggcgcgcgcggcagcaacgagtactgctcagactacactgccctccaccgttaactagagttgagcaagcagggtcaggcaaagcgtggagagccggctgagtctaggtaggctccaagggagcgccggacaaaggcccggtctcgacctgagctttaaacttacctagacggcggacgcagttcaggaggcaccacaggcgggaggcggcagaacgcgactcaaccggcgtggatggcggcctcaggtagggcggcgggcgcgtgaaggagagatgcgagccgatggaggctggatcggtcccggtgtcttctatggaggtcaaaacagcgtggatggcgtctccaggcgatctgacggttcactaaacgagctctgcttatatagacctcccaccgtacacgcctaccgcccatttgcgtcaatggggcggagttgttacgacattttgggaattcccgttgattttggtgagtcaaaacaaactcccattgacgtcaatggggtggagacttggaagttcccgtgagtcaaaccgctatccacgcccattgatgtactgccaaaaccgcatcaccatggtaatagcgatgactaatacgtagatgtactgccaagtaggaaattcccataaggtcatgtactgggcataatgcaagcttatggaagttcccgtcattgacgtcaatagggggcgtacttggcatatgatacacttggaaattcccaagtgggcagtttaccgtaaatactccacccattgacgtcaatggaagttccctattggcgttactatgggaacatacgtcattattgacgtcaatgggcgggggtcgttgggcggtcagccaggtttggaaattcccgtaagttatgtaacgcggaactccatatatgggctatggaagttcccgtaattgattactattaataactagtcaataatcaatgtcaacatggcggtaatgttggacatgagccaatataaatgtacatattatgatatggatacaacgtatgcaatggccaatagccaatctgatgcggtattttctccttacgcatctgtgcggtatttcacaccgcatatggtgcactctcagtacaatctgctctgatgccgcatagttaagccagccccgacacccgccaacacccgctgacgcgccctgacgggcttgtctgctcccggcatccgcttacagacaagctgtgaccgtctccgggagctgcatgtgtcagaggttttcaccgtcatcaccgaaacgcgcga

SEQ ID NO: 9 - DNA, 5835 bp, Influenza A virus
tcgcgcgtttcggtgatgacggtgaaaacctctgacacatgcagctcccggagacggtcacagcttgtctgtaagcggatgccgggagcagacaagcccgtcagggcgcgtcagcgggtgttggcgggtgtcggggctggcttaactatgcggcatcagagcagattgtactgagagtgcaccatatgcggtgtgaaataccgcacagatgcgtaaggagaaaataccgcatcagattggctattggccattgcatacgttgtatccatatcataatatgtacatttatattggctcatgtccaacattaccgccatgttgacattgattattgactagttattaatagtaatcaattacgggaacttccatagcccatatatggagttccgcgttacataacttacgggaatttccaaacctggctgaccgcccaacgacccccgcccattgacgtcaataatgacgtatgttcccatagtaacgccaatagggaacttccattgacgtcaatgggtggagtatttacggtaaactgcccacttgggaatttccaagtgtatcatatgccaagtacgccccctattgacgtcaatgacgggaacttccataagcttgcattatgcccagtacatgaccttatgggaatttcctacttggcagtacatctacgtattagtcatcgctattaccatggtgatgcggttttggcagtacatcaatgggcgtggatagcggtttgactcacgggaacttccaagtctccaccccattgacgtcaatgggagtttgttttgactcaccaaaatcaacgggaattcccaaaatgtcgtaacaactccgccccattgacgcaaatgggcggtaggcgtgtacggtgggaggtctatataagcagagctcgtttagtgaaccgtcagatcgcctggagacgccatccacgctgttttgacctccatagaagacaccgggaccgatccagcctccatcggctcgcatctctccttcacgcgcccgccgccctacctgaggccgccatccacgccggttgagtcgcgttctgccgcctcccgcctgtggtgcctcctgaactgcgtccgccgtctaggtaagtttaaagctcaggtcgagaccgggcctttgtccggcgctcccttggagcctacctagactcagccggctctccacgctttgcctgaccctgcttgctcaactctagttaacggtggagggcagtgtagtctgagcagtactcgttgctgccgcgcgcgccaccagacataatagctgacagactaacagactgttcctttccatgggtcttttctgcagtcaccgtcgtcgacacgtgtgatcagatatcgcggccgctctagagatatcgccaccatgaaccccaaccagaagatcatcaccatcggcagcatctgcatggtggtgggcatcatcagcctgatcctgcagatcggcaacatcatcagcatctgggtgtcccacagcatccagaccggcaaccagaaccaccccgagacctgcaaccagtccatcatcacctacgagaacaacacctgggtgaaccagacctacgtgaacatcagcaacaccaacgtggtggccggccaggacgccacctccgtgatcctgaccggcaatagcagcctgtgccccatcagcggctgggccatctacagcaaggacaacggcatccggatcggcagcaagggcgacgtgttcgtgatccgggagcccttcatcagctgcagccacctggaatgccggaccttcttcctgacccaaggcgccctgctgaacgacaagcacagcaacggcaccgtgaaggacagaagcccctaccggaccctgatgagctgccccgtgggcgaggctcccagcccctacaacagccggttcgagagcgtggcctggtccgccagcgcctgccacgacggcatgggctggctgaccatcggcatcagcggccctgacaacggcgccgtggccgtgctgaagtacaatggcatcatcaccgacaccatcaagagctggcggaacaacatcctgcggacccaggaaagcgagtgcgcctgcgtgaacggcagctgcttcaccatcatgaccgacggccccagcaacggccaggccagctacaagatcctgaagatcgagaagggcaaggtgaccaagagcatcgagctgaacgcccccaactaccactacgaggaatgcagctgctaccccgacaccggcaaagtgatgtgcgtgtgccgggacaactggcacggcagcaaccggccctgggtgtccttcgaccagaacctggactaccagatcggctatatctgcagcggcgtgttcggcgacaaccccaggcccaacgacggcaccggcagctgcggccctgtgagcagcaacggcgccaacggcatcaagggcttcagcttcagatacgacaacggcgtgtggatcggccggaccaagtccacctccagcagatccggcttcgagatgatctgggaccccaacggctggaccgagaccgacagcagcttcagcgtgcggcaggacatcgtggccatcaccgactggtccggctacagcggcagcttcgtgcagcaccccgagctgaccggcctggactgcatgcggccctgcttttgggtggagctgatcagaggccagcccaaagagaacaccatctggaccagcggcagcagcatcagcttttgcggcgtgaacagcgacaccgtgggctggtcctggcccgatggcgccgagctgcccttcagcatcgacaagtgatgaacacgtgggatccagatctgctgtgccttctagttgccagccatctgttgtttgcccctcccccgtgccttccttgaccctggaaggtgccactcccactgtcctttcctaataaaatgaggaaattgcatcgcattgtctgagtaggtgtcattctattctggggggtggggtggggcaggacagcaagggggaggattgggaagacaatagcaggcatgctggggatgcggtgggctctatgggtacccaggtgctgaagaattgacccggttcctcctgggccagaaagaagcaggcacatccccttctctgtgacacaccctgtccacgcccctggttcttagttccagccccactcataggacactcatagctcaggagggctccgccttcaatcccacccgctaaagtacttggagcggtctctccctccctcatcagcccaccaaaccaaacctagcctccaagagtgggaagaaattaaagcaagataggctattaagtgcagagggagagaaaatgcctccaacatgtgaggaagtaatgagagaaatcatagaattttaaggccatgatttaaggccatcatggccttaatcttccgcttcctcgctcactgactcgctgcgctcggtcgttcggctgcggcgagcggtatcagctcactcaaaggcggtaatacggttatccacagaatcaggggataacgcaggaaagaacatgtgagcaaaaggccagcaaaaggccaggaaccgtaaaaaggccgcgttgctggcgtttttccataggctccgcccccctgacgagcatcacaaaaatcgacgctcaagtcagaggtggcgaaacccgacaggactataaagataccaggcgtttccccctggaagctccctcgtgcgctctcctgttccgaccctgccgcttaccggatacctgtccgcctttctcccttcgggaagcgtggcgctttctcatagctcacgctgtaggtatctcagttcggtgtaggtcgttcgctccaagctgggctgtgtgcacgaaccccccgttcagcccgaccgctgcgccttatccggtaactatcgtcttgagtccaacccggtaagacacgacttatcgccactggcagcagccactggtaacaggattagcagagcgaggtatgtaggcggtgctacagagttcttgaagtggtggcctaactacggctacactagaagaacagtatttggtatctgcgctctgctgaagccagttaccttcggaaaaagagttggtagctcttgatccggcaaacaaaccaccgctggtagcggtggtttttttgtttgcaagcagcagattacgcgcagaaaaaaaggatctcaagaagatcctttgatcttttctacggggtctgacgctcagtggaacgaaaactcacgttaagggattttggtcatgagattatcaaaaaggatcttcacctagatccttttaaattaaaaatgaagttttaaatcaatctaaagtatatatgagtaaacttggtctgacagttaccaatgcttaatcagtgaggcacctatctcagcgatctgtctatttcgttcatccatagttgcctgactcggggggggggggcgctgaggtctgcctcgtgaagaaggtgttgctgactcataccaggcctgaatcgccccatcatccagccagaaagtgagggagccacggttgatgagagctttgttgtaggtggaccagttggtgattttgaacttttgctttgccacggaacggtctgcgttgtcgggaagatgcgtgatctgatccttcaactcagcaaaagttcgatttattcaacaaagccgccgtcccgtcaagtcagcgtaatgctctgccagtgttacaaccaattaaccaattctgattagaaaaactcatcgagcatcaaatgaaactgcaatttattcatatcaggattatcaataccatatttttgaaaaagccgtttctgtaatgaaggagaaaactcaccgaggcagttccataggatggcaagatcctggtatcggtctgcgattccgactcgtccaacatcaatacaacctattaatttcccctcgtcaaaaataaggttatcaagtgagaaatcaccatgagtgacgactgaatccggtgagaatggcaaaagcttatgcatttctttccagacttgttcaacaggccagccattacgctcgtcatcaaaatcactcgcatcaaccaaaccgttattcattcgtgattgcgcctgagcgagacgaaatacgcgatcgctgttaaaaggacaattacaaacaggaatcgaatgcaaccggcgcaggaacactgccagcgcatcaacaatattttcacctgaatcaggatattcttctaatacctggaatgctgttttcccggggatcgcagtggtgagtaaccatgcatcatcaggagtacggataaaatgcttgatggtcggaagaggcataaattccgtcagccagtttagtctgaccatctcatctgtaacatcattggcaacgctacctttgccatgtttcagaaacaactctggcgcatcgggcttcccatacaatcgatagattgtcgcacctgattgcccgacattatcgcgagcccatttatacccatataaatcagcatccatgttggaatttaatcgcggcctcgagcaagacgtttcccgttgaatatggctcataacaccccttgtattactgtttatgtaagcagacagttttattgttcatgatgatatatttttatcttgtgcaatgtaacatcagagattttgagacacaacgtggctttccccccccccccattattgaagcatttatcagggttattgtctcatgagcggatacatatttgaatgtatttagaaaaataaacaaataggggttccgcgcacatttccccgaaaagtgccacctgacgtctaagaaaccattattatcatgacattaacctataaaaataggcgtatcacgaggccctttcgtc

SEQ ID NO: 10 - DNA, 1407 bp, Influenza A virus
  CDS (1)..(1407)
atgaaccccaaccagaagatcatcaccatcggcagcatctgcatggtggtgggcatcatcagcctgatcctgcagatcggcaacatcatcagcatctgggtgtcccacagcatccagaccggcaaccagaaccaccccgagacctgcaaccagtccatcatcacctacgagaacaacacctgggtgaaccagacctacgtgaacatcagcaacaccaacgtggtggccggccaggacgccacctccgtgatcctgaccggcaatagcagcctgtgccccatcagcggctgggccatctacagcaaggacaacggcatccggatcggcagcaagggcgacgtgttcgtgatccgggagcccttcatcagctgcagccacctggaatgccggaccttcttcctgacccaaggcgccctgctgaacgacaagcacagcaacggcaccgtgaaggacagaagcccctaccggaccctgatgagctgccccgtgggcgaggctcccagcccctacaacagccggttcgagagcgtggcctggtccgccagcgcctgccacgacggcatgggctggctgaccatcggcatcagcggccctgacaacggcgccgtggccgtgctgaagtacaatggcatcatcaccgacaccatcaagagctggcggaacaacatcctgcggacccaggaaagcgagtgcgcctgcgtgaacggcagctgcttcaccatcatgaccgacggccccagcaacggccaggccagctacaagatcctgaagatcgagaagggcaaggtgaccaagagcatcgagctgaacgcccccaactaccactacgaggaatgcagctgctaccccgacaccggcaaagtgatgtgcgtgtgccgggacaactggcacggcagcaaccggccctgggtgtccttcgaccagaacctggactaccagatcggctatatctgcagcggcgtgttcggcgacaaccccaggcccaacgacggcaccggcagctgcggccctgtgagcagcaacggcgccaacggcatcaagggcttcagcttcagatacgacaacggcgtgtggatcggccggaccaagtccacctccagcagatccggcttcgagatgatctgggaccccaacggctggaccgagaccgacagcagcttcagcgtgcggcaggacatcgtggccatcaccgactggtccggctacagcggcagcttcgtgcagcaccccgagctgaccggcctggactgcatgcggccctgcttttgggtggagctgatcagaggccagcccaaagagaacaccatctggaccagcggcagcagcatcagcttttgcggcgtgaacagcgacaccgtgggctggtcctggcccgatggcgccgagctgcccttcagcatcgacaag

SEQ ID NO: 11 - protein, 469 aa, Influenza A virus
MNPNQKIITIGSICMVVGIISLILQIGNIISIWVSHSIQTGNQNHPETCNQSIITYENNTWVNQTYVNISNTNVVAGQDATSVILTGNSSLCPISGWAIYSKDNGIRIGSKGDVFVIREPFISCSHLECRTFFLTQGALLNDKHSNGTVKDRSPYRTLMSCPVGEAPSPYNSRFESVAWSASACHDGMGWLTIGISGPDNGAVAVLKYNGIITDTIKSWRNNILRTQESECACVNGSCFTIMTDGPSNGQASYKILKIEKGKVTKSIELNAPNYHYEECSCYPDTGKVMCVCRDNWHGSNRPWVSFDQNLDYQIGYICSGVFGDNPRPNDGTGSCGPVSSNGANGIKGFSFRYDNGVWIGRTKSTSSRSGFEMIWDPNGWTETDSSFSVRQDIVAITDWSGYSGSFVQHPELTGLDCMRPCFWVELIRGQPKENTIWTSGSSISFCGVNSDTVGWSWPDGAELPFSIDK

SEQ ID NO: 12 - DNA, 5835 bp, Influenza A virus
gacgaaagggcctcgtgatacgcctatttttataggttaatgtcatgataataatggtttcttagacgtcaggtggcacttttcggggaaatgtgcgcggaacccctatttgtttatttttctaaatacattcaaatatgtatccgctcatgagacaataaccctgataaatgcttcaataatggggggggggggaaagccacgttgtgtctcaaaatctctgatgttacattgcacaagataaaaatatatcatcatgaacaataaaactgtctgcttacataaacagtaatacaaggggtgttatgagccatattcaacgggaaacgtcttgctcgaggccgcgattaaattccaacatggatgctgatttatatgggtataaatgggctcgcgataatgtcgggcaatcaggtgcgacaatctatcgattgtatgggaagcccgatgcgccagagttgtttctgaaacatggcaaaggtagcgttgccaatgatgttacagatgagatggtcagactaaactggctgacggaatttatgcctcttccgaccatcaagcattttatccgtactcctgatgatgcatggttactcaccactgcgatccccgggaaaacagcattccaggtattagaagaatatcctgattcaggtgaaaatattgttgatgcgctggcagtgttcctgcgccggttgcattcgattcctgtttgtaattgtccttttaacagcgatcgcgtatttcgtctcgctcaggcgcaatcacgaatgaataacggtttggttgatgcgagtgattttgatgacgagcgtaatggctggcctgttgaacaagtctggaaagaaatgcataagcttttgccattctcaccggattcagtcgtcactcatggtgatttctcacttgataaccttatttttgacgaggggaaattaataggttgtattgatgttggacgagtcggaatcgcagaccgataccaggatcttgccatcctatggaactgcctcggtgagttttctccttcattacagaaacggctttttcaaaaatatggtattgataatcctgatatgaataaattgcagtttcatttgatgctcgatgagtttttctaatcagaattggttaattggttgtaacactggcagagcattacgctgacttgacgggacggcggctttgttgaataaatcgaacttttgctgagttgaaggatcagatcacgcatcttcccgacaacgcagaccgttccgtggcaaagcaaaagttcaaaatcaccaactggtccacctacaacaaagctctcatcaaccgtggctccctcactttctggctggatgatggggcgattcaggcctggtatgagtcagcaacaccttcttcacgaggcagacctcagcgccccccccccccgagtcaggcaactatggatgaacgaaatagacagatcgctgagataggtgcctcactgattaagcattggtaactgtcagaccaagtttactcatatatactttagattgatttaaaacttcatttttaatttaaaaggatctaggtgaagatcctttttgataatctcatgaccaaaatcccttaacgtgagttttcgttccactgagcgtcagaccccgtagaaaagatcaaaggatcttcttgagatcctttttttctgcgcgtaatctgctgcttgcaaacaaaaaaaccaccgctaccagcggtggtttgtttgccggatcaagagctaccaactctttttccgaaggtaactggcttcagcagagcgcagataccaaatactgttcttctagtgtagccgtagttaggccaccacttcaagaactctgtagcaccgcctacatacctcgctctgctaatcctgttaccagtggctgctgccagtggcgataagtcgtgtcttaccgggttggactcaagacgatagttaccggataaggcgcagcggtcgggctgaacggggggttcgtgcacacagcccagcttggagcgaacgacctacaccgaactgagatacctacagcgtgagctatgagaaagcgccacgcttcccgaagggagaaaggcggacaggtatccggtaagcggcagggtcggaacaggagagcgcacgagggagcttccagggggaaacgcctggtatctttatagtcctgtcgggtttcgccacctctgacttgagcgtcgatttttgtgatgctcgtcaggggggcggagcctatggaaaaacgccagcaacgcggcctttttacggttcctggccttttgctggccttttgctcacatgttctttcctgcgttatcccctgattctgtggataaccgtattaccgcctttgagtgagctgataccgctcgccgcagccgaacgaccgagcgcagcgagtcagtgagcgaggaagcggaagattaaggccatgatggccttaaatcatggccttaaaattctatgatttctctcattacttcctcacatgttggaggcattttctctccctctgcacttaatagcctatcttgctttaatttcttcccactcttggaggctaggtttggtttggtgggctgatgagggagggagagaccgctccaagtactttagcgggtgggattgaaggcggagccctcctgagctatgagtgtcctatgagtggggctggaactaagaaccaggggcgtggacagggtgtgtcacagagaaggggatgtgcctgcttctttctggcccaggaggaaccgggtcaattcttcagcacctgggtacccatagagcccaccgcatccccagcatgcctgctattgtcttcccaatcctcccccttgctgtcctgccccaccccaccccccagaatagaatgacacctactcagacaatgcgatgcaatttcctcattttattaggaaaggacagtgggagtggcaccttccagggtcaaggaaggcacgggggaggggcaaacaacagatggctggcaactagaaggcacagcagatctggatcccacgtgttcatcacttgtcgatgctgaagggcagctcggcgccatcgggccaggaccagcccacggtgtcgctgttcacgccgcaaaagctgatgctgctgccgctggtccagatggtgttctctttgggctggcctctgatcagctccacccaaaagcagggccgcatgcagtccaggccggtcagctcggggtgctgcacgaagctgccgctgtagccggaccagtcggtgatggccacgatgtcctgccgcacgctgaagctgctgtcggtctcggtccagccgttggggtcccagatcatctcgaagccggatctgctggaggtggacttggtccggccgatccacacgccgttgtcgtatctgaagctgaagcccttgatgccgttggcgccgttgctgctcacagggccgcagctgccggtgccgtcgttgggcctggggttgtcgccgaacacgccgctgcagatatagccgatctggtagtccaggttctggtcgaaggacacccagggccggttgctgccgtgccagttgtcccggcacacgcacatcactttgccggtgtcggggtagcagctgcattcctcgtagtggtagttgggggcgttcagctcgatgctcttggtcaccttgcccttctcgatcttcaggatcttgtagctggcctggccgttgctggggccgtcggtcatgatggtgaagcagctgccgttcacgcaggcgcactcgctttcctgggtccgcaggatgttgttccgccagctcttgatggtgtcggtgatgatgccattgtacttcagcacggccacggcgccgttgtcagggccgctgatgccgatggtcagccagcccatgccgtcgtggcaggcgctggcggaccaggccacgctctcgaaccggctgttgtaggggctgggagcctcgcccacggggcagctcatcagggtccggtaggggcttctgtccttcacggtgccgttgctgtgcttgtcgttcagcagggcgccttgggtcaggaagaaggtccggcattccaggtggctgcagctgatgaagggctcccggatcacgaacacgtcgcccttgctgccgatccggatgccgttgtccttgctgtagatggcccagccgctgatggggcacaggctgctattgccggtcaggatcacggaggtggcgtcctggccggccaccacgttggtgttgctgatgttcacgtaggtctggttcacccaggtgttgttctcgtaggtgatgatggactggttgcaggtctcggggtggttctggttgccggtctggatgctgtgggacacccagatgctgatgatgttgccgatctgcaggatcaggctgatgatgcccaccaccatgcagatgctgccgatggtgatgatcttctggttggggttcatggtggcgatatctctagagcggccgcgatatctgatcacacgtgtcgacgacggtgactgcagaaaagacccatggaaaggaacagtctgttagtctgtcagctattatgtctggtggcgcgcgcggcagcaacgagtactgctcagactacactgccctccaccgttaactagagttgagcaagcagggtcaggcaaagcgtggagagccggctgagtctaggtaggctccaagggagcgccggacaaaggcccggtctcgacctgagctttaaacttacctagacggcggacgcagttcaggaggcaccacaggcgggaggcggcagaacgcgactcaaccggcgtggatggcggcctcaggtagggcggcgggcgcgtgaaggagagatgcgagccgatggaggctggatcggtcccggtgtcttctatggaggtcaaaacagcgtggatggcgtctccaggcgatctgacggttcactaaacgagctctgcttatatagacctcccaccgtacacgcctaccgcccatttgcgtcaatggggcggagttgttacgacattttgggaattcccgttgattttggtgagtcaaaacaaactcccattgacgtcaatggggtggagacttggaagttcccgtgagtcaaaccgctatccacgcccattgatgtactgccaaaaccgcatcaccatggtaatagcgatgactaatacgtagatgtactgccaagtaggaaattcccataaggtcatgtactgggcataatgcaagcttatggaagttcccgtcattgacgtcaatagggggcgtacttggcatatgatacacttggaaattcccaagtgggcagtttaccgtaaatactccacccattgacgtcaatggaagttccctattggcgttactatgggaacatacgtcattattgacgtcaatgggcgggggtcgttgggcggtcagccaggtttggaaattcccgtaagttatgtaacgcggaactccatatatgggctatggaagttcccgtaattgattactattaataactagtcaataatcaatgtcaacatggcggtaatgttggacatgagccaatataaatgtacatattatgatatggatacaacgtatgcaatggccaatagccaatctgatgcggtattttctccttacgcatctgtgcggtatttcacaccgcatatggtgcactctcagtacaatctgctctgatgccgcatagttaagccagccccgacacccgccaacacccgctgacgcgccctgacgggcttgtctgctcccggcatccgcttacagacaagctgtgaccgtctccgggagctgcatgtgtcagaggttttcaccgtcatcaccgaaacgcgcga

SEQ ID NO: 13 - DNA, 6117 bp, Influenza A virus
tcgcgcgtttcggtgatgacggtgaaaacctctgacacatgcagctcccggagacggtcacagcttgtctgtaagcggatgccgggagcagacaagcccgtcagggcgcgtcagcgggtgttggcgggtgtcggggctggcttaactatgcggcatcagagcagattgtactgagagtgcaccatatgcggtgtgaaataccgcacagatgcgtaaggagaaaataccgcatcagattggctattggccattgcatacgttgtatccatatcataatatgtacatttatattggctcatgtccaacattaccgccatgttgacattgattattgactagttattaatagtaatcaattacgggaacttccatagcccatatatggagttccgcgttacataacttacgggaatttccaaacctggctgaccgcccaacgacccccgcccattgacgtcaataatgacgtatgttcccatagtaacgccaatagggaacttccattgacgtcaatgggtggagtatttacggtaaactgcccacttgggaatttccaagtgtatcatatgccaagtacgccccctattgacgtcaatgacgggaacttccataagcttgcattatgcccagtacatgaccttatgggaatttcctacttggcagtacatctacgtattagtcatcgctattaccatggtgatgcggttttggcagtacatcaatgggcgtggatagcggtttgactcacgggaacttccaagtctccaccccattgacgtcaatgggagtttgttttgactcaccaaaatcaacgggaattcccaaaatgtcgtaacaactccgccccattgacgcaaatgggcggtaggcgtgtacggtgggaggtctatataagcagagctcgtttagtgaaccgtcagatcgcctggagacgccatccacgctgttttgacctccatagaagacaccgggaccgatccagcctccatcggctcgcatctctccttcacgcgcccgccgccctacctgaggccgccatccacgccggttgagtcgcgttctgccgcctcccgcctgtggtgcctcctgaactgcgtccgccgtctaggtaagtttaaagctcaggtcgagaccgggcctttgtccggcgctcccttggagcctacctagactcagccggctctccacgctttgcctgaccctgcttgctcaactctagttaacggtggagggcagtgtagtctgagcagtactcgttgctgccgcgcgcgccaccagacataatagctgacagactaacagactgttcctttccatgggtcttttctgcagtcaccgtcgtcgacacgtgtgatcagatatcgcggccgctctagagatatcgccaccatgaaggccaaactgctggtgctgctgtgtacctttaccgccacctacgccgacacaatctgtatcggctaccacgccaacaatagcaccgacaccgtggatacagtgctggagaagaacgtgaccgtgacccactctgtgaacctgctggaggacagccacaatggcaagctgtgtctgctgaaaggcattgcccctctgcagctgggcaattgttctgtggccggatggattctgggcaaccccgagtgtgagctgctgatttctaaggagagctggagctacatcgtggagacccccaatcctgagaatggcacctgctaccctggctacttcgccgattacgaggagctgcgcgagcagctgtctagcgtgtccagcttcgagagattcgagatcttccccaaggagtccagctggcctaatcacacagtgacaggcgtgtctgccagctgtagccacaacggcaaaagcagcttctaccggaacctgctgtggctgacaggcaagaatggcctgtaccccaacctgagcaagagctacgtgaacaacaaggaaaaggaagtgctggtgctgtggggagtgcaccaccctcccaacatcggaaatcagcgggccctgtaccacacagagaacgcctatgtgagcgtggtgtccagccactacagcagaagattcacccccgagatcgccaagagacccaaagtgagagaccaggagggccggatcaattactactggaccctgctggagcctggcgataccatcatcttcgaggccaacggcaatctgatcgccccttggtatgcctttgccctgagcagaggctttggcagcggcatcatcacaagcaacgcccccatggatgagtgtgatgccaagtgccagacacctcagggcgccatcaatagcagcctgcccttccagaatgtgcaccctgtgaccatcggcgagtgccccaagtatgtgagaagcgccaagctgagaatggtgaccggcctgagaaacatccctcagagggagaccagaggactgtttggagccatcgccggattcatcgagggaggatggacaggcatggtggatggctggtacggctaccaccaccagaatgagcagggctctggatatgccgccgatcagaagtctacccagaacgccatcaacggcatcaccaacaaggtgaacagcgtgatcgagaagatgaacacccagtttaccgctgtgggcaaggagttcaacaagctggagcggaggatggagaacctgaacaagaaggtggacgacggctttctggacatctggacctacaatgccgaactcctggtcctcctcgagaatgagaggaccctggacttccacgacagcaacgtgaagaacctgtatgagaaggtgaagagccagctgaagaacaacgccaaggagatcggcaacggctgcttcgagttctaccacaagtgtaacaacgagtgtatggagagcgtgaagaacggcacctacgactaccctaagtacagcgaggagagcaagctgaaccgggagaagatcgatagcggcagactggtgcctagaggatctcctggcagcggatatattcctgaggcccctagagatggacaggcctatgtgagaaaggatggcgaatgggtgctgctgtctacatttctgggacaccaccatcaccaccattgatgaacacgtgggatccagatctgctgtgccttctagttgccagccatctgttgtttgcccctcccccgtgccttccttgaccctggaaggtgccactcccactgtcctttcctaataaaatgaggaaattgcatcgcattgtctgagtaggtgtcattctattctggggggtggggtggggcaggacagcaagggggaggattgggaagacaatagcaggcatgctggggatgcggtgggctctatgggtacccaggtgctgaagaattgacccggttcctcctgggccagaaagaagcaggcacatccccttctctgtgacacaccctgtccacgcccctggttcttagttccagccccactcataggacactcatagctcaggagggctccgccttcaatcccacccgctaaagtacttggagcggtctctccctccctcatcagcccaccaaaccaaacctagcctccaagagtgggaagaaattaaagcaagataggctattaagtgcagagggagagaaaatgcctccaacatgtgaggaagtaatgagagaaatcatagaattttaaggccatgatttaaggccatcatggccttaatcttccgcttcctcgctcactgactcgctgcgctcggtcgttcggctgcggcgagcggtatcagctcactcaaaggcggtaatacggttatccacagaatcaggggataacgcaggaaagaacatgtgagcaaaaggccagcaaaaggccaggaaccgtaaaaaggccgcgttgctggcgtttttccataggctccgcccccctgacgagcatcacaaaaatcgacgctcaagtcagaggtggcgaaacccgacaggactataaagataccaggcgtttccccctggaagctccctcgtgcgctctcctgttccgaccctgccgcttaccggatacctgtccgcctttctcccttcgggaagcgtggcgctttctcatagctcacgctgtaggtatctcagttcggtgtaggtcgttcgctccaagctgggctgtgtgcacgaaccccccgttcagcccgaccgctgcgccttatccggtaactatcgtcttgagtccaacccggtaagacacgacttatcgccactggcagcagccactggtaacaggattagcagagcgaggtatgtaggcggtgctacagagttcttgaagtggtggcctaactacggctacactagaagaacagtatttggtatctgcgctctgctgaagccagttaccttcggaaaaagagttggtagctcttgatccggcaaacaaaccaccgctggtagcggtggtttttttgtttgcaagcagcagattacgcgcagaaaaaaaggatctcaagaagatcctttgatcttttctacggggtctgacgctcagtggaacgaaaactcacgttaagggattttggtcatgagattatcaaaaaggatcttcacctagatccttttaaattaaaaatgaagttttaaatcaatctaaagtatatatgagtaaacttggtctgacagttaccaatgcttaatcagtgaggcacctatctcagcgatctgtctatttcgttcatccatagttgcctgactcggggggggggggcgctgaggtctgcctcgtgaagaaggtgttgctgactcataccaggcctgaatcgccccatcatccagccagaaagtgagggagccacggttgatgagagctttgttgtaggtggaccagttggtgattttgaacttttgctttgccacggaacggtctgcgttgtcgggaagatgcgtgatctgatccttcaactcagcaaaagttcgatttattcaacaaagccgccgtcccgtcaagtcagcgtaatgctctgccagtgttacaaccaattaaccaattctgattagaaaaactcatcgagcatcaaatgaaactgcaatttattcatatcaggattatcaataccatatttttgaaaaagccgtttctgtaatgaaggagaaaactcaccgaggcagttccataggatggcaagatcctggtatcggtctgcgattccgactcgtccaacatcaatacaacctattaatttcccctcgtcaaaaataaggttatcaagtgagaaatcaccatgagtgacgactgaatccggtgagaatggcaaaagcttatgcatttctttccagacttgttcaacaggccagccattacgctcgtcatcaaaatcactcgcatcaaccaaaccgttattcattcgtgattgcgcctgagcgagacgaaatacgcgatcgctgttaaaaggacaattacaaacaggaatcgaatgcaaccggcgcaggaacactgccagcgcatcaacaatattttcacctgaatcaggatattcttctaatacctggaatgctgttttcccggggatcgcagtggtgagtaaccatgcatcatcaggagtacggataaaatgcttgatggtcggaagaggcataaattccgtcagccagtttagtctgaccatctcatctgtaacatcattggcaacgctacctttgccatgtttcagaaacaactctggcgcatcgggcttcccatacaatcgatagattgtcgcacctgattgcccgacattatcgcgagcccatttatacccatataaatcagcatccatgttggaatttaatcgcggcctcgagcaagacgtttcccgttgaatatggctcataacaccccttgtattactgtttatgtaagcagacagttttattgttcatgatgatatatttttatcttgtgcaatgtaacatcagagattttgagacacaacgtggctttccccccccccccattattgaagcatttatcagggttattgtctcatgagcggatacatatttgaatgtatttagaaaaataaacaaataggggttccgcgcacatttccccgaaaagtgccacctgacgtctaagaaaccattattatcatgacattaacctataaaaataggcgtatcacgaggccctttcgtc

SEQ ID NO: 14 - DNA, 1689 bp, Influenza A virus
  CDS (1)..(1689)
atgaaggccaaactgctggtgctgctgtgtacctttaccgccacctacgccgacacaatctgtatcggctaccacgccaacaatagcaccgacaccgtggatacagtgctggagaagaacgtgaccgtgacccactctgtgaacctgctggaggacagccacaatggcaagctgtgtctgctgaaaggcattgcccctctgcagctgggcaattgttctgtggccggatggattctgggcaaccccgagtgtgagctgctgatttctaaggagagctggagctacatcgtggagacccccaatcctgagaatggcacctgctaccctggctacttcgccgattacgaggagctgcgcgagcagctgtctagcgtgtccagcttcgagagattcgagatcttccccaaggagtccagctggcctaatcacacagtgacaggcgtgtctgccagctgtagccacaacggcaaaagcagcttctaccggaacctgctgtggctgacaggcaagaatggcctgtaccccaacctgagcaagagctacgtgaacaacaaggaaaaggaagtgctggtgctgtggggagtgcaccaccctcccaacatcggaaatcagcgggccctgtaccacacagagaacgcctatgtgagcgtggtgtccagccactacagcagaagattcacccccgagatcgccaagagacccaaagtgagagaccaggagggccggatcaattactactggaccctgctggagcctggcgataccatcatcttcgaggccaacggcaatctgatcgccccttggtatgcctttgccctgagcagaggctttggcagcggcatcatcacaagcaacgcccccatggatgagtgtgatgccaagtgccagacacctcagggcgccatcaatagcagcctgcccttccagaatgtgcaccctgtgaccatcggcgagtgccccaagtatgtgagaagcgccaagctgagaatggtgaccggcctgagaaacatccctcagagggagaccagaggactgtttggagccatcgccggattcatcgagggaggatggacaggcatggtggatggctggtacggctaccaccaccagaatgagcagggctctggatatgccgccgatcagaagtctacccagaacgccatcaacggcatcaccaacaaggtgaacagcgtgatcgagaagatgaacacccagtttaccgctgtgggcaaggagttcaacaagctggagcggaggatggagaacctgaacaagaaggtggacgacggctttctggacatctggacctacaatgccgaactcctggtcctcctcgagaatgagaggaccctggacttccacgacagcaacgtgaagaacctgtatgagaaggtgaagagccagctgaagaacaacgccaaggagatcggcaacggctgcttcgagttctaccacaagtgtaacaacgagtgtatggagagcgtgaagaacggcacctacgactaccctaagtacagcgaggagagcaagctgaaccgggagaagatcgatagcggcagactggtgcctagaggatctcctggcagcggatatattcctgaggcccctagagatggacaggcctatgtgagaaaggatggcgaatgggtgctgctgtctacatttctgggacaccaccatcaccaccat

SEQ ID NO: 15 - protein, 563 aa, Influenza A virus
MKAKLLVLLCTFTATYADTICIGYHANNSTDTVDTVLEKNVTVTHSVNLLEDSHNGKLCLLKGIAPLQLGNCSVAGWILGNPECELLISKESWSYIVETPNPENGTCYPGYFADYEELREQLSSVSSFERFEIFPKESSWPNHTVTGVSASCSHNGKSSFYRNLLWLTGKNGLYPNLSKSYVNNKEKEVLVLWGVHHPPNIGNQRALYHTENAYVSVVSSHYSRRFTPEIAKRPKVRDQEGRINYYWTLLEPGDTIIFEANGNLIAPWYAFALSRGFGSGIITSNAPMDECDAKCQTPQGAINSSLPFQNVHPVTIGECPKYVRSAKLRMVTGLRNIPQRETRGLFGAIAGFIEGGWTGMVDGWYGYHHQNEQGSGYAADQKSTQNAINGITNKVNSVIEKMNTQFTAVGKEFNKLERRMENLNKKVDDGFLDIWTYNAELLVLLENERTLDFHDSNVKNLYEKVKSQLKNNAKEIGNGCFEFYHKCNNECMESVKNGTYDYPKYSEESKLNREKIDSGRLVPRGSPGSGYIPEAPRDGQAYVRKDGEWVLLSTFLGHHHHHH

SEQ ID NO: 16 - DNA, 6117 bp, Influenza A virus
gacgaaagggcctcgtgatacgcctatttttataggttaatgtcatgataataatggtttcttagacgtcaggtggcacttttcggggaaatgtgcgcggaacccctatttgtttatttttctaaatacattcaaatatgtatccgctcatgagacaataaccctgataaatgcttcaataatggggggggggggaaagccacgttgtgtctcaaaatctctgatgttacattgcacaagataaaaatatatcatcatgaacaataaaactgtctgcttacataaacagtaatacaaggggtgttatgagccatattcaacgggaaacgtcttgctcgaggccgcgattaaattccaacatggatgctgatttatatgggtataaatgggctcgcgataatgtcgggcaatcaggtgcgacaatctatcgattgtatgggaagcccgatgcgccagagttgtttctgaaacatggcaaaggtagcgttgccaatgatgttacagatgagatggtcagactaaactggctgacggaatttatgcctcttccgaccatcaagcattttatccgtactcctgatgatgcatggttactcaccactgcgatccccgggaaaacagcattccaggtattagaagaatatcctgattcaggtgaaaatattgttgatgcgctggcagtgttcctgcgccggttgcattcgattcctgtttgtaattgtccttttaacagcgatcgcgtatttcgtctcgctcaggcgcaatcacgaatgaataacggtttggttgatgcgagtgattttgatgacgagcgtaatggctggcctgttgaacaagtctggaaagaaatgcataagcttttgccattctcaccggattcagtcgtcactcatggtgatttctcacttgataaccttatttttgacgaggggaaattaataggttgtattgatgttggacgagtcggaatcgcagaccgataccaggatcttgccatcctatggaactgcctcggtgagttttctccttcattacagaaacggctttttcaaaaatatggtattgataatcctgatatgaataaattgcagtttcatttgatgctcgatgagtttttctaatcagaattggttaattggttgtaacactggcagagcattacgctgacttgacgggacggcggctttgttgaataaatcgaacttttgctgagttgaaggatcagatcacgcatcttcccgacaacgcagaccgttccgtggcaaagcaaaagttcaaaatcaccaactggtccacctacaacaaagctctcatcaaccgtggctccctcactttctggctggatgatggggcgattcaggcctggtatgagtcagcaacaccttcttcacgaggcagacctcagcgccccccccccccgagtcaggcaactatggatgaacgaaatagacagatcgctgagataggtgcctcactgattaagcattggtaactgtcagaccaagtttactcatatatactttagattgatttaaaacttcatttttaatttaaaaggatctaggtgaagatcctttttgataatctcatgaccaaaatcccttaacgtgagttttcgttccactgagcgtcagaccccgtagaaaagatcaaaggatcttcttgagatcctttttttctgcgcgtaatctgctgcttgcaaacaaaaaaaccaccgctaccagcggtggtttgtttgccggatcaagagctaccaactctttttccgaaggtaactggcttcagcagagcgcagataccaaatactgttcttctagtgtagccgtagttaggccaccacttcaagaactctgtagcaccgcctacatacctcgctctgctaatcctgttaccagtggctgctgccagtggcgataagtcgtgtcttaccgggttggactcaagacgatagttaccggataaggcgcagcggtcgggctgaacggggggttcgtgcacacagcccagcttggagcgaacgacctacaccgaactgagatacctacagcgtgagctatgagaaagcgccacgcttcccgaagggagaaaggcggacaggtatccggtaagcggcagggtcggaacaggagagcgcacgagggagcttccagggggaaacgcctggtatctttatagtcctgtcgggtttcgccacctctgacttgagcgtcgatttttgtgatgctcgtcaggggggcggagcctatggaaaaacgccagcaacgcggcctttttacggttcctggccttttgctggccttttgctcacatgttctttcctgcgttatcccctgattctgtggataaccgtattaccgcctttgagtgagctgataccgctcgccgcagccgaacgaccgagcgcagcgagtcagtgagcgaggaagcggaagattaaggccatgatggccttaaatcatggccttaaaattctatgatttctctcattacttcctcacatgttggaggcattttctctccctctgcacttaatagcctatcttgctttaatttcttcccactcttggaggctaggtttggtttggtgggctgatgagggagggagagaccgctccaagtactttagcgggtgggattgaaggcggagccctcctgagctatgagtgtcctatgagtggggctggaactaagaaccaggggcgtggacagggtgtgtcacagagaaggggatgtgcctgcttctttctggcccaggaggaaccgggtcaattcttcagcacctgggtacccatagagcccaccgcatccccagcatgcctgctattgtcttcccaatcctcccccttgctgtcctgccccaccccaccccccagaatagaatgacacctactcagacaatgcgatgcaatttcctcattttattaggaaaggacagtgggagtggcaccttccagggtcaaggaaggcacgggggaggggcaaacaacagatggctggcaactagaaggcacagcagatctggatcccacgtgttcatcaatggtggtgatggtggtgtcccagaaatgtagacagcagcacccattcgccatcctttctcacataggcctgtccatctctaggggcctcaggaatatatccgctgccaggagatcctctaggcaccagtctgccgctatcgatcttctcccggttcagcttgctctcctcgctgtacttagggtagtcgtaggtgccgttcttcacgctctccatacactcgttgttacacttgtggtagaactcgaagcagccgttgccgatctccttggcgttgttcttcagctggctcttcaccttctcatacaggttcttcacgttgctgtcgtggaagtccagggtcctctcattctcgaggaggaccaggagttcggcattgtaggtccagatgtccagaaagccgtcgtccaccttcttgttcaggttctccatcctccgctccagcttgttgaactccttgcccacagcggtaaactgggtgttcatcttctcgatcacgctgttcaccttgttggtgatgccgttgatggcgttctgggtagacttctgatcggcggcatatccagagccctgctcattctggtggtggtagccgtaccagccatccaccatgcctgtccatcctccctcgatgaatccggcgatggctccaaacagtcctctggtctccctctgagggatgtttctcaggccggtcaccattctcagcttggcgcttctcacatacttggggcactcgccgatggtcacagggtgcacattctggaagggcaggctgctattgatggcgccctgaggtgtctggcacttggcatcacactcatccatgggggcgttgcttgtgatgatgccgctgccaaagcctctgctcagggcaaaggcataccaaggggcgatcagattgccgttggcctcgaagatgatggtatcgccaggctccagcagggtccagtagtaattgatccggccctcctggtctctcactttgggtctcttggcgatctcgggggtgaatcttctgctgtagtggctggacaccacgctcacataggcgttctctgtgtggtacagggcccgctgatttccgatgttgggagggtggtgcactccccacagcaccagcacttccttttccttgttgttcacgtagctcttgctcaggttggggtacaggccattcttgcctgtcagccacagcaggttccggtagaagctgcttttgccgttgtggctacagctggcagacacgcctgtcactgtgtgattaggccagctggactccttggggaagatctcgaatctctcgaagctggacacgctagacagctgctcgcgcagctcctcgtaatcggcgaagtagccagggtagcaggtgccattctcaggattgggggtctccacgatgtagctccagctctccttagaaatcagcagctcacactcggggttgcccagaatccatccggccacagaacaattgcccagctgcagaggggcaatgcctttcagcagacacagcttgccattgtggctgtcctccagcaggttcacagagtgggtcacggtcacgttcttctccagcactgtatccacggtgtcggtgctattgttggcgtggtagccgatacagattgtgtcggcgtaggtggcggtaaaggtacacagcagcaccagcagtttggccttcatggtggcgatatctctagagcggccgcgatatctgatcacacgtgtcgacgacggtgactgcagaaaagacccatggaaaggaacagtctgttagtctgtcagctattatgtctggtggcgcgcgcggcagcaacgagtactgctcagactacactgccctccaccgttaactagagttgagcaagcagggtcaggcaaagcgtggagagccggctgagtctaggtaggctccaagggagcgccggacaaaggcccggtctcgacctgagctttaaacttacctagacggcggacgcagttcaggaggcaccacaggcgggaggcggcagaacgcgactcaaccggcgtggatggcggcctcaggtagggcggcgggcgcgtgaaggagagatgcgagccgatggaggctggatcggtcccggtgtcttctatggaggtcaaaacagcgtggatggcgtctccaggcgatctgacggttcactaaacgagctctgcttatatagacctcccaccgtacacgcctaccgcccatttgcgtcaatggggcggagttgttacgacattttgggaattcccgttgattttggtgagtcaaaacaaactcccattgacgtcaatggggtggagacttggaagttcccgtgagtcaaaccgctatccacgcccattgatgtactgccaaaaccgcatcaccatggtaatagcgatgactaatacgtagatgtactgccaagtaggaaattcccataaggtcatgtactgggcataatgcaagcttatggaagttcccgtcattgacgtcaatagggggcgtacttggcatatgatacacttggaaattcccaagtgggcagtttaccgtaaatactccacccattgacgtcaatggaagttccctattggcgttactatgggaacatacgtcattattgacgtcaatgggcgggggtcgttgggcggtcagccaggtttggaaattcccgtaagttatgtaacgcggaactccatatatgggctatggaagttcccgtaattgattactattaataactagtcaataatcaatgtcaacatggcggtaatgttggacatgagccaatataaatgtacatattatgatatggatacaacgtatgcaatggccaatagccaatctgatgcggtattttctccttacgcatctgtgcggtatttcacaccgcatatggtgcactctcagtacaatctgctctgatgccgcatagttaagccagccccgacacccgccaacacccgctgacgcgccctgacgggcttgtctgctcccggcatccgcttacagacaagctgtgaccgtctccgggagctgcatgtgtcagaggttttcaccgtcatcaccgaaacgcgcga

SEQ ID NO: 17 - DNA, 6114 bp, Influenza A virus
tcgcgcgtttcggtgatgacggtgaaaacctctgacacatgcagctcccggagacggtcacagcttgtctgtaagcggatgccgggagcagacaagcccgtcagggcgcgtcagcgggtgttggcgggtgtcggggctggcttaactatgcggcatcagagcagattgtactgagagtgcaccatatgcggtgtgaaataccgcacagatgcgtaaggagaaaataccgcatcagattggctattggccattgcatacgttgtatccatatcataatatgtacatttatattggctcatgtccaacattaccgccatgttgacattgattattgactagttattaatagtaatcaattacggggtcattagttcatagcccatatatggagttccgcgttacataacttacggtaaatggcccgcctggctgaccgcccaacgacccccgcccattgacgtcaataatgacgtatgttcccatagtaacgccaatagggactttccattgacgtcaatgggtggagtatttacggtaaactgcccacttggcagtacatcaagtgtatcatatgccaagtacgccccctattgacgtcaatgacggtaaatggcccgcctggcattatgcccagtacatgaccttatgggactttcctacttggcagtacatctacgtattagtcatcgctattaccatggtgatgcggttttggcagtacatcaatgggcgtggatagcggtttgactcacggggatttccaagtctccaccccattgacgtcaatgggagtttgttttggcaccaaaatcaacgggactttccaaaatgtcgtaacaactccgccccattgacgcaaatgggcggtaggcgtgtacggtgggaggtctatataagcagagctcgtttagtgaaccgtcagatcgcctggagacgccatccacgctgttttgacctccatagaagacaccgggaccgatccagcctccatcggctcgcatctctccttcacgcgcccgccgccctacctgaggccgccatccacgccggttgagtcgcgttctgccgcctcccgcctgtggtgcctcctgaactgcgtccgccgtctaggtaagtttaaagctcaggtcgagaccgggcctttgtccggcgctcccttggagcctacctagactcagccggctctccacgctttgcctgaccctgcttgctcaactctagttaacggtggagggcagtgtagtctgagcagtactcgttgctgccgcgcgcgccaccagacataatagctgacagactaacagactgttcctttccatgggtcttttctgcagtcaccgtcgtcgacacgtgtgatcagatatcgcggccgctctagacaccatgaaggccatcctggtggtgctgctgtacaccttcgccaccgccaacgccgacaccctgtgcatcggctaccacgccaacaacagcaccgacaccgtggacaccgtgctggagaagaacgtgaccgtgacccacagcgtgaacctgctggaggacaagcacaacggcaagctgtgcaagctgcggggcgtggcccccctgcacctgggcaagtgcaacatcgccggctggattctgggcaaccccgagtgcgagagcctgagcaccgccagcagctggagctacatcgtggagacccccagcagcgacaacggcacctgctaccccggcgacttcatcgactacgaggagctgcgggagcagctgagcagcgtgagcagcttcgagcggttcgagatcttccccaagaccagcagctggcccaaccacgacagcaacaagggcgtgaccgccgcctgcccccacgccggcgccaagagcttctacaagaacctgatctggctggtgaagaagggcaacagctaccccaagctgagcaagagctacatcaacgacaagggcaaggaggtgctggtgctgtggggcatccaccaccccagcaccagcgccgaccagcagagcctgtaccagaacgccgacacctacgtgttcgtgggcagcagccggtacagcaagaagttcaagcccgagatcgccatccggcccaaggtgcgggaccaggagggccggatgaactactactggaccctggtggagcccggcgacaagatcaccttcgaggccaccggcaacctggtggtgccccggtacgccttcgccatggagcggaacgccggcagcggcatcatcatcagcgacacccccgtgcacgactgcaacaccacctgccagacccccaagggcgccatcaacaccagcctgcccttccagaacatccaccccatcaccatcggcaagtgccccaagtacgtgaagagcaccaagctgcggctggccaccggcctgcggaacatccccagcatccagagccggggcctgttcggcgccatcgccggcttcatcgagggcggctggaccggcatggtggacggctggtacggctaccaccaccagaacgagcagggcagcggctacgccgccgacctgaagagcacccagaacgccatcgacgagatcaccaacaaggtgaacagcgtgatcgagaagatgaacacccagttcaccgccgtgggcaaggagttcaaccacctggagaagcggatcgagaacctgaacaagaaggtggacgacggcttcctggacatctggacctacaacgccgagctgctggtgctgctggagaacgagcggaccctggactaccacgacagcaacgtgaagaacctgtacgagaaggtgcggagccagctgaagaacaacgccaaggagatcggcaacggctgcttcgagttctaccacaagtgcgacaacacctgcatggagagcgtgaagaacggcacctacgactaccccaagtacagcgaggaggccaagctgaaccgggaggagatcgacagcggcagactggtgcctagaggatctcctggcagcggatatattcctgaggcccctagagatggacaggcctatgtgagaaaggatggcgaatgggtgctgctgtctacatttctgggacaccaccatcaccaccattgatgaacacgtgggatccagatctgctgtgccttctagttgccagccatctgttgtttgcccctcccccgtgccttccttgaccctggaaggtgccactcccactgtcctttcctaataaaatgaggaaattgcatcgcattgtctgagtaggtgtcattctattctggggggtggggtggggcaggacagcaagggggaggattgggaagacaatagcaggcatgctggggatgcggtgggctctatgggtacccaggtgctgaagaattgacccggttcctcctgggccagaaagaagcaggcacatccccttctctgtgacacaccctgtccacgcccctggttcttagttccagccccactcataggacactcatagctcaggagggctccgccttcaatcccacccgctaaagtacttggagcggtctctccctccctcatcagcccaccaaaccaaacctagcctccaagagtgggaagaaattaaagcaagataggctattaagtgcagagggagagaaaatgcctccaacatgtgaggaagtaatgagagaaatcatagaattttaaggccatgatttaaggccatcatggccttaatcttccgcttcctcgctcactgactcgctgcgctcggtcgttcggctgcggcgagcggtatcagctcactcaaaggcggtaatacggttatccacagaatcaggggataacgcaggaaagaacatgtgagcaaaaggccagcaaaaggccaggaaccgtaaaaaggccgcgttgctggcgtttttccataggctccgcccccctgacgagcatcacaaaaatcgacgctcaagtcagaggtggcgaaacccgacaggactataaagataccaggcgtttccccctggaagctccctcgtgcgctctcctgttccgaccctgccgcttaccggatacctgtccgcctttctcccttcgggaagcgtggcgctttctcatagctcacgctgtaggtatctcagttcggtgtaggtcgttcgctccaagctgggctgtgtgcacgaaccccccgttcagcccgaccgctgcgccttatccggtaactatcgtcttgagtccaacccggtaagacacgacttatcgccactggcagcagccactggtaacaggattagcagagcgaggtatgtaggcggtgctacagagttcttgaagtggtggcctaactacggctacactagaagaacagtatttggtatctgcgctctgctgaagccagttaccttcggaaaaagagttggtagctcttgatccggcaaacaaaccaccgctggtagcggtggtttttttgtttgcaagcagcagattacgcgcagaaaaaaaggatctcaagaagatcctttgatcttttctacggggtctgacgctcagtggaacgaaaactcacgttaagggattttggtcatgagattatcaaaaaggatcttcacctagatccttttaaattaaaaatgaagttttaaatcaatctaaagtatatatgagtaaacttggtctgacagttaccaatgcttaatcagtgaggcacctatctcagcgatctgtctatttcgttcatccatagttgcctgactcggggggggggggcgctgaggtctgcctcgtgaagaaggtgttgctgactcataccaggcctgaatcgccccatcatccagccagaaagtgagggagccacggttgatgagagctttgttgtaggtggaccagttggtgattttgaacttttgctttgccacggaacggtctgcgttgtcgggaagatgcgtgatctgatccttcaactcagcaaaagttcgatttattcaacaaagccgccgtcccgtcaagtcagcgtaatgctctgccagtgttacaaccaattaaccaattctgattagaaaaactcatcgagcatcaaatgaaactgcaatttattcatatcaggattatcaataccatatttttgaaaaagccgtttctgtaatgaaggagaaaactcaccgaggcagttccataggatggcaagatcctggtatcggtctgcgattccgactcgtccaacatcaatacaacctattaatttcccctcgtcaaaaataaggttatcaagtgagaaatcaccatgagtgacgactgaatccggtgagaatggcaaaagcttatgcatttctttccagacttgttcaacaggccagccattacgctcgtcatcaaaatcactcgcatcaaccaaaccgttattcattcgtgattgcgcctgagcgagacgaaatacgcgatcgctgttaaaaggacaattacaaacaggaatcgaatgcaaccggcgcaggaacactgccagcgcatcaacaatattttcacctgaatcaggatattcttctaatacctggaatgctgttttcccggggatcgcagtggtgagtaaccatgcatcatcaggagtacggataaaatgcttgatggtcggaagaggcataaattccgtcagccagtttagtctgaccatctcatctgtaacatcattggcaacgctacctttgccatgtttcagaaacaactctggcgcatcgggcttcccatacaatcgatagattgtcgcacctgattgcccgacattatcgcgagcccatttatacccatataaatcagcatccatgttggaatttaatcgcggcctcgagcaagacgtttcccgttgaatatggctcataacaccccttgtattactgtttatgtaagcagacagttttattgttcatgatgatatatttttatcttgtgcaatgtaacatcagagattttgagacacaacgtggctttccccccccccccattattgaagcatttatcagggttattgtctcatgagcggatacatatttgaatgtatttagaaaaataaacaaataggggttccgcgcacatttccccgaaaagtgccacctgacgtctaagaaaccattattatcatgacattaacctataaaaataggcgtatcacgaggccctttcgtc

SEQ ID NO: 18 - DNA, 1692 bp, Influenza A virus
  CDS (1)..(1692)
atgaaggccatcctggtggtgctgctgtacaccttcgccaccgccaacgccgacaccctgtgcatcggctaccacgccaacaacagcaccgacaccgtggacaccgtgctggagaagaacgtgaccgtgacccacagcgtgaacctgctggaggacaagcacaacggcaagctgtgcaagctgcggggcgtggcccccctgcacctgggcaagtgcaacatcgccggctggattctgggcaaccccgagtgcgagagcctgagcaccgccagcagctggagctacatcgtggagacccccagcagcgacaacggcacctgctaccccggcgacttcatcgactacgaggagctgcgggagcagctgagcagcgtgagcagcttcgagcggttcgagatcttccccaagaccagcagctggcccaaccacgacagcaacaagggcgtgaccgccgcctgcccccacgccggcgccaagagcttctacaagaacctgatctggctggtgaagaagggcaacagctaccccaagctgagcaagagctacatcaacgacaagggcaaggaggtgctggtgctgtggggcatccaccaccccagcaccagcgccgaccagcagagcctgtaccagaacgccgacacctacgtgttcgtgggcagcagccggtacagcaagaagttcaagcccgagatcgccatccggcccaaggtgcgggaccaggagggccggatgaactactactggaccctggtggagcccggcgacaagatcaccttcgaggccaccggcaacctggtggtgccccggtacgccttcgccatggagcggaacgccggcagcggcatcatcatcagcgacacccccgtgcacgactgcaacaccacctgccagacccccaagggcgccatcaacaccagcctgcccttccagaacatccaccccatcaccatcggcaagtgccccaagtacgtgaagagcaccaagctgcggctggccaccggcctgcggaacatccccagcatccagagccggggcctgttcggcgccatcgccggcttcatcgagggcggctggaccggcatggtggacggctggtacggctaccaccaccagaacgagcagggcagcggctacgccgccgacctgaagagcacccagaacgccatcgacgagatcaccaacaaggtgaacagcgtgatcgagaagatgaacacccagttcaccgccgtgggcaaggagttcaaccacctggagaagcggatcgagaacctgaacaagaaggtggacgacggcttcctggacatctggacctacaacgccgagctgctggtgctgctggagaacgagcggaccctggactaccacgacagcaacgtgaagaacctgtacgagaaggtgcggagccagctgaagaacaacgccaaggagatcggcaacggctgcttcgagttctaccacaagtgcgacaacacctgcatggagagcgtgaagaacggcacctacgactaccccaagtacagcgaggaggccaagctgaaccgggaggagatcgacagcggcagactggtgcctagaggatctcctggcagcggatatattcctgaggcccctagagatggacaggcctatgtgagaaaggatggcgaatgggtgctgctgtctacatttctgggacaccaccatcaccaccat

SEQ ID NO: 19 - protein, 564 aa, Influenza A virus
MKAILVVLLYTFATANADTLCIGYHANNSTDTVDTVLEKNVTVTHSVNLLEDKHNGKLCKLRGVAPLHLGKCNIAGWILGNPECESLSTASSWSYIVETPSSDNGTCYPGDFIDYEELREQLSSVSSFERFEIFPKTSSWPNHDSNKGVTAACPHAGAKSFYKNLIWLVKKGNSYPKLSKSYINDKGKEVLVLWGIHHPSTSADQQSLYQNADTYVFVGSSRYSKKFKPEIAIRPKVRDQEGRMNYYWTLVEPGDKITFEATGNLVVPRYAFAMERNAGSGIIISDTPVHDCNTTCQTPKGAINTSLPFQNIHPITIGKCPKYVKSTKLRLATGLRNIPSIQSRGLFGAIAGFIEGGWTGMVDGWYGYHHQNEQGSGYAADLKSTQNAIDEITNKVNSVIEKMNTQFTAVGKEFNHLEKRIENLNKKVDDGFLDIWTYNAELLVLLENERTLDYHDSNVKNLYEKVRSQLKNNAKEIGNGCFEFYHKCDNTCMESVKNGTYDYPKYSEEAKLNREEIDSGRLVPRGSPGSGYIPEAPRDGQAYVRKDGEWVLLSTFLGHHHHHH

SEQ ID NO: 20 - DNA, 6114 bp, Influenza A virus
gacgaaagggcctcgtgatacgcctatttttataggttaatgtcatgataataatggtttcttagacgtcaggtggcacttttcggggaaatgtgcgcggaacccctatttgtttatttttctaaatacattcaaatatgtatccgctcatgagacaataaccctgataaatgcttcaataatggggggggggggaaagccacgttgtgtctcaaaatctctgatgttacattgcacaagataaaaatatatcatcatgaacaataaaactgtctgcttacataaacagtaatacaaggggtgttatgagccatattcaacgggaaacgtcttgctcgaggccgcgattaaattccaacatggatgctgatttatatgggtataaatgggctcgcgataatgtcgggcaatcaggtgcgacaatctatcgattgtatgggaagcccgatgcgccagagttgtttctgaaacatggcaaaggtagcgttgccaatgatgttacagatgagatggtcagactaaactggctgacggaatttatgcctcttccgaccatcaagcattttatccgtactcctgatgatgcatggttactcaccactgcgatccccgggaaaacagcattccaggtattagaagaatatcctgattcaggtgaaaatattgttgatgcgctggcagtgttcctgcgccggttgcattcgattcctgtttgtaattgtccttttaacagcgatcgcgtatttcgtctcgctcaggcgcaatcacgaatgaataacggtttggttgatgcgagtgattttgatgacgagcgtaatggctggcctgttgaacaagtctggaaagaaatgcataagcttttgccattctcaccggattcagtcgtcactcatggtgatttctcacttgataaccttatttttgacgaggggaaattaataggttgtattgatgttggacgagtcggaatcgcagaccgataccaggatcttgccatcctatggaactgcctcggtgagttttctccttcattacagaaacggctttttcaaaaatatggtattgataatcctgatatgaataaattgcagtttcatttgatgctcgatgagtttttctaatcagaattggttaattggttgtaacactggcagagcattacgctgacttgacgggacggcggctttgttgaataaatcgaacttttgctgagttgaaggatcagatcacgcatcttcccgacaacgcagaccgttccgtggcaaagcaaaagttcaaaatcaccaactggtccacctacaacaaagctctcatcaaccgtggctccctcactttctggctggatgatggggcgattcaggcctggtatgagtcagcaacaccttcttcacgaggcagacctcagcgccccccccccccgagtcaggcaactatggatgaacgaaatagacagatcgctgagataggtgcctcactgattaagcattggtaactgtcagaccaagtttactcatatatactttagattgatttaaaacttcatttttaatttaaaaggatctaggtgaagatcctttttgataatctcatgaccaaaatcccttaacgtgagttttcgttccactgagcgtcagaccccgtagaaaagatcaaaggatcttcttgagatcctttttttctgcgcgtaatctgctgcttgcaaacaaaaaaaccaccgctaccagcggtggtttgtttgccggatcaagagctaccaactctttttccgaaggtaactggcttcagcagagcgcagataccaaatactgttcttctagtgtagccgtagttaggccaccacttcaagaactctgtagcaccgcctacatacctcgctctgctaatcctgttaccagtggctgctgccagtggcgataagtcgtgtcttaccgggttggactcaagacgatagttaccggataaggcgcagcggtcgggctgaacggggggttcgtgcacacagcccagcttggagcgaacgacctacaccgaactgagatacctacagcgtgagctatgagaaagcgccacgcttcccgaagggagaaaggcggacaggtatccggtaagcggcagggtcggaacaggagagcgcacgagggagcttccagggggaaacgcctggtatctttatagtcctgtcgggtttcgccacctctgacttgagcgtcgatttttgtgatgctcgtcaggggggcggagcctatggaaaaacgccagcaacgcggcctttttacggttcctggccttttgctggccttttgctcacatgttctttcctgcgttatcccctgattctgtggataaccgtattaccgcctttgagtgagctgataccgctcgccgcagccgaacgaccgagcgcagcgagtcagtgagcgaggaagcggaagattaaggccatgatggccttaaatcatggccttaaaattctatgatttctctcattacttcctcacatgttggaggcattttctctccctctgcacttaatagcctatcttgctttaatttcttcccactcttggaggctaggtttggtttggtgggctgatgagggagggagagaccgctccaagtactttagcgggtgggattgaaggcggagccctcctgagctatgagtgtcctatgagtggggctggaactaagaaccaggggcgtggacagggtgtgtcacagagaaggggatgtgcctgcttctttctggcccaggaggaaccgggtcaattcttcagcacctgggtacccatagagcccaccgcatccccagcatgcctgctattgtcttcccaatcctcccccttgctgtcctgccccaccccaccccccagaatagaatgacacctactcagacaatgcgatgcaatttcctcattttattaggaaaggacagtgggagtggcaccttccagggtcaaggaaggcacgggggaggggcaaacaacagatggctggcaactagaaggcacagcagatctggatcccacgtgttcatcaatggtggtgatggtggtgtcccagaaatgtagacagcagcacccattcgccatcctttctcacataggcctgtccatctctaggggcctcaggaatatatccgctgccaggagatcctctaggcaccagtctgccgctgtcgatctcctcccggttcagcttggcctcctcgctgtacttggggtagtcgtaggtgccgttcttcacgctctccatgcaggtgttgtcgcacttgtggtagaactcgaagcagccgttgccgatctccttggcgttgttcttcagctggctccgcaccttctcgtacaggttcttcacgttgctgtcgtggtagtccagggtccgctcgttctccagcagcaccagcagctcggcgttgtaggtccagatgtccaggaagccgtcgtccaccttcttgttcaggttctcgatccgcttctccaggtggttgaactccttgcccacggcggtgaactgggtgttcatcttctcgatcacgctgttcaccttgttggtgatctcgtcgatggcgttctgggtgctcttcaggtcggcggcgtagccgctgccctgctcgttctggtggtggtagccgtaccagccgtccaccatgccggtccagccgccctcgatgaagccggcgatggcgccgaacaggccccggctctggatgctggggatgttccgcaggccggtggccagccgcagcttggtgctcttcacgtacttggggcacttgccgatggtgatggggtggatgttctggaagggcaggctggtgttgatggcgcccttgggggtctggcaggtggtgttgcagtcgtgcacgggggtgtcgctgatgatgatgccgctgccggcgttccgctccatggcgaaggcgtaccggggcaccaccaggttgccggtggcctcgaaggtgatcttgtcgccgggctccaccagggtccagtagtagttcatccggccctcctggtcccgcaccttgggccggatggcgatctcgggcttgaacttcttgctgtaccggctgctgcccacgaacacgtaggtgtcggcgttctggtacaggctctgctggtcggcgctggtgctggggtggtggatgccccacagcaccagcacctccttgcccttgtcgttgatgtagctcttgctcagcttggggtagctgttgcccttcttcaccagccagatcaggttcttgtagaagctcttggcgccggcgtgggggcaggcggcggtcacgcccttgttgctgtcgtggttgggccagctgctggtcttggggaagatctcgaaccgctcgaagctgctcacgctgctcagctgctcccgcagctcctcgtagtcgatgaagtcgccggggtagcaggtgccgttgtcgctgctgggggtctccacgatgtagctccagctgctggcggtgctcaggctctcgcactcggggttgcccagaatccagccggcgatgttgcacttgcccaggtgcaggggggccacgccccgcagcttgcacagcttgccgttgtgcttgtcctccagcaggttcacgctgtgggtcacggtcacgttcttctccagcacggtgtccacggtgtcggtgctgttgttggcgtggtagccgatgcacagggtgtcggcgttggcggtggcgaaggtgtacagcagcaccaccaggatggccttcatggtgtctagagcggccgcgatatctgatcacacgtgtcgacgacggtgactgcagaaaagacccatggaaaggaacagtctgttagtctgtcagctattatgtctggtggcgcgcgcggcagcaacgagtactgctcagactacactgccctccaccgttaactagagttgagcaagcagggtcaggcaaagcgtggagagccggctgagtctaggtaggctccaagggagcgccggacaaaggcccggtctcgacctgagctttaaacttacctagacggcggacgcagttcaggaggcaccacaggcgggaggcggcagaacgcgactcaaccggcgtggatggcggcctcaggtagggcggcgggcgcgtgaaggagagatgcgagccgatggaggctggatcggtcccggtgtcttctatggaggtcaaaacagcgtggatggcgtctccaggcgatctgacggttcactaaacgagctctgcttatatagacctcccaccgtacacgcctaccgcccatttgcgtcaatggggcggagttgttacgacattttggaaagtcccgttgattttggtgccaaaacaaactcccattgacgtcaatggggtggagacttggaaatccccgtgagtcaaaccgctatccacgcccattgatgtactgccaaaaccgcatcaccatggtaatagcgatgactaatacgtagatgtactgccaagtaggaaagtcccataaggtcatgtactgggcataatgccaggcgggccatttaccgtcattgacgtcaatagggggcgtacttggcatatgatacacttgatgtactgccaagtgggcagtttaccgtaaatactccacccattgacgtcaatggaaagtccctattggcgttactatgggaacatacgtcattattgacgtcaatgggcgggggtcgttgggcggtcagccaggcgggccatttaccgtaagttatgtaacgcggaactccatatatgggctatgaactaatgaccccgtaattgattactattaataactagtcaataatcaatgtcaacatggcggtaatgttggacatgagccaatataaatgtacatattatgatatggatacaacgtatgcaatggccaatagccaatctgatgcggtattttctccttacgcatctgtgcggtatttcacaccgcatatggtgcactctcagtacaatctgctctgatgccgcatagttaagccagccccgacacccgccaacacccgctgacgcgccctgacgggcttgtctgctcccggcatccgcttacagacaagctgtgaccgtctccgggagctgcatgtgtcagaggttttcaccgtcatcaccgaaacgcgcga

SEQ ID NO: 21 - DNA, 5837 bp, Influenza A virus
tcgcgcgtttcggtgatgacggtgaaaacctctgacacatgcagctcccggagacggtcacagcttgtctgtaagcggatgccgggagcagacaagcccgtcagggcgcgtcagcgggtgttggcgggtgtcggggctggcttaactatgcggcatcagagcagattgtactgagagtgcaccatatgcggtgtgaaataccgcacagatgcgtaaggagaaaataccgcatcagattggctattggccattgcatacgttgtatccatatcataatatgtacatttatattggctcatgtccaacattaccgccatgttgacattgattattgactagttattaatagtaatcaattacggggtcattagttcatagcccatatatggagttccgcgttacataacttacggtaaatggcccgcctggctgaccgcccaacgacccccgcccattgacgtcaataatgacgtatgttcccatagtaacgccaatagggactttccattgacgtcaatgggtggagtatttacggtaaactgcccacttggcagtacatcaagtgtatcatatgccaagtacgccccctattgacgtcaatgacggtaaatggcccgcctggcattatgcccagtacatgaccttatgggactttcctacttggcagtacatctacgtattagtcatcgctattaccatggtgatgcggttttggcagtacatcaatgggcgtggatagcggtttgactcacggggatttccaagtctccaccccattgacgtcaatgggagtttgttttggcaccaaaatcaacgggactttccaaaatgtcgtaacaactccgccccattgacgcaaatgggcggtaggcgtgtacggtgggaggtctatataagcagagctcgtttagtgaaccgtcagatcgcctggagacgccatccacgctgttttgacctccatagaagacaccgggaccgatccagcctccatcggctcgcatctctccttcacgcgcccgccgccctacctgaggccgccatccacgccggttgagtcgcgttctgccgcctcccgcctgtggtgcctcctgaactgcgtccgccgtctaggtaagtttaaagctcaggtcgagaccgggcctttgtccggcgctcccttggagcctacctagactcagccggctctccacgctttgcctgaccctgcttgctcaactctagttaacggtggagggcagtgtagtctgagcagtactcgttgctgccgcgcgcgccaccagacataatagctgacagactaacagactgttcctttccatgggtcttttctgcagtcaccgtcgtcgacacgtgtgatcagatatcgcggccgctctagagatatcgccaccatgaatcctaatcagaaaattattaccatagggagcgtctgtatgactataggaatggctaacctcattctccaaatcgggaacatcattagtatctggatctcacactctatccagctcggcaaccaaaaccagatcgagacatgtaatcagtctgtaatcacgtacgagaacaacacctgggtcaatcagacctatgtaaatatatcaaacaccaatttcgccgccgggcaatctgtggtgagcgtgaaacttgctggcaattcttccctctgtcctgtgtcaggttgggctatttactctaaggataatagcgtccggatcgggtccaagggcgacgtgttcgtcatccgcgagccttttatttcctgctcaccgctggagtgtcgcaccttctttctgacccagggggccttgctcaacgacaaacacagcaatgggacaataaaagaccggtctccctatcgcactctgatgagctgccccatcggtgaggttccgtctccttataatagtagatttgaaagtgtggcgtggtctgcaagcgcatgccatgacgggataaattggctgactatagggattagtggaccagataatggggctgtcgcggtcctgaagtataatgggatcattactgacacaataaagtcatggcggaataatattctcagaacacaggagagcgagtgtgcatgcgtaaacgggagctgcttcactgtgatgacagatggaccctctaatggacaggcttcttacaagatttttaggatcgaaaagggaaagatcgttaaaagtgtggagatgaatgctccaaattatcattacgaggagtgctcctgttaccctgattcatccgaaatcacttgtgtatgtcgggataactggcacggcagcaatcgcccctgggttagcttcaaccaaaacctggagtaccagattggctatatctgtagtggaatcttcggggacaacccaagacccaacgataagacgggctcctgcggaccagtaagctctaacggggcaaacggtgtaaagggtttcagcttcaaatacggtaacggtgtatggatagggcggacaaaaagtatctctagtcgaaatggcttcgagatgatctgggaccctaacggctggactggcactgacaacaatttctccatcaagcaggatatcgttggaatcaacgagtggtctggatactccggctcatttgttcaacatccagagctgacaggtctggattgcatccgaccttgtttttgggtcgaactgatccgaggccgccccaaagagaatacaatatggacatccggatcatctatctcattctgtggagtgaactcagacaccgtaggctggtcatggccggatggggctgagcttccttttacaatagacaagtgatgaacacgtgggatccagatctgctgtgccttctagttgccagccatctgttgtttgcccctcccccgtgccttccttgaccctggaaggtgccactcccactgtcctttcctaataaaatgaggaaattgcatcgcattgtctgagtaggtgtcattctattctggggggtggggtggggcaggacagcaagggggaggattgggaagacaatagcaggcatgctggggatgcggtgggctctatgggtacccaggtgctgaagaattgacccggttcctcctgggccagaaagaagcaggcacatccccttctctgtgacacaccctgtccacgcccctggttcttagttccagccccactcataggacactcatagctcaggagggctccgccttcaatcccacccgctaaagtacttggagcggtctctccctccctcatcagcccaccaaaccaaacctagcctccaagagtgggaagaaattaaagcaagataggctattaagtgcagagggagagaaaatgcctccaacatgtgaggaagtaatgagagaaatcatagaattttaaggccatgatttaaggccatcatggccttaatcttccgcttcctcgctcactgactcgctgcgctcggtcgttcggctgcggcgagcggtatcagctcactcaaaggcggtaatacggttatccacagaatcaggggataacgcaggaaagaacatgtgagcaaaaggccagcaaaaggccaggaaccgtaaaaaggccgcgttgctggcgtttttccataggctccgcccccctgacgagcatcacaaaaatcgacgctcaagtcagaggtggcgaaacccgacaggactataaagataccaggcgtttccccctggaagctccctcgtgcgctctcctgttccgaccctgccgcttaccggatacctgtccgcctttctcccttcgggaagcgtggcgctttctcatagctcacgctgtaggtatctcagttcggtgtaggtcgttcgctccaagctgggctgtgtgcacgaaccccccgttcagcccgaccgctgcgccttatccggtaactatcgtcttgagtccaacccggtaagacacgacttatcgccactggcagcagccactggtaacaggattagcagagcgaggtatgtaggcggtgctacagagttcttgaagtggtggcctaactacggctacactagaagaacagtatttggtatctgcgctctgctgaagccagttaccttcggaaaaagagttggtagctcttgatccggcaaacaaaccaccgctggtagcggtggtttttttgtttgcaagcagcagattacgcgcagaaaaaaaggatctcaagaagatcctttgatcttttctacggggtctgacgctcagtggaacgaaaactcacgttaagggattttggtcatgagattatcaaaaaggatcttcacctagatccttttaaattaaaaatgaagttttaaatcaatctaaagtatatatgagtaaacttggtctgacagttaccaatgcttaatcagtgaggcacctatctcagcgatctgtctatttcgttcatccatagttgcctgactcggggggggggggcgctgaggtctgcctcgtgaagaaggtgttgctgactcataccaggcctgaatcgccccatcatccagccagaaagtgagggagccacggttgatgagagctttgttgtaggtggaccagttggtgattttgaacttttgctttgccacggaacggtctgcgttgtcgggaagatgcgtgatctgatccttcaactcagcaaaagttcgatttattcaacaaagccgccgtcccgtcaagtcagcgtaatgctctgccagtgttacaaccaattaaccaattctgattagaaaaactcatcgagcatcaaatgaaactgcaatttattcatatcaggattatcaataccatatttttgaaaaagccgtttctgtaatgaaggagaaaactcaccgaggcagttccataggatggcaagatcctggtatcggtctgcgattccgactcgtccaacatcaatacaacctattaatttcccctcgtcaaaaataaggttatcaagtgagaaatcaccatgagtgacgactgaatccggtgagaatggcaaaagcttatgcatttctttccagacttgttcaacaggccagccattacgctcgtcatcaaaatcactcgcatcaaccaaaccgttattcattcgtgattgcgcctgagcgagacgaaatacgcgatcgctgttaaaaggacaattacaaacaggaatcgaatgcaaccggcgcaggaacactgccagcgcatcaacaatattttcacctgaatcaggatattcttctaatacctggaatgctgttttcccggggatcgcagtggtgagtaaccatgcatcatcaggagtacggataaaatgcttgatggtcggaagaggcataaattccgtcagccagtttagtctgaccatctcatctgtaacatcattggcaacgctacctttgccatgtttcagaaacaactctggcgcatcgggcttcccatacaatcgatagattgtcgcacctgattgcccgacattatcgcgagcccatttatacccatataaatcagcatccatgttggaatttaatcgcggcctcgagcaagacgtttcccgttgaatatggctcataacaccccttgtattactgtttatgtaagcagacagttttattgttcatgatgatatatttttatcttgtgcaatgtaacatcagagattttgagacacaacgtggctttccccccccccccattattgaagcatttatcagggttattgtctcatgagcggatacatatttgaatgtatttagaaaaataaacaaataggggttccgcgcacatttccccgaaaagtgccacctgacgtctaagaaaccattattatcatgacattaacctataaaaataggcgtatcacgaggccctttcgtc

SEQ ID NO: 22 - DNA, 1407 bp, Influenza A virus
  CDS (1)..(1407)
atgaatcctaatcagaaaattattaccatagggagcgtctgtatgactataggaatggctaacctcattctccaaatcgggaacatcattagtatctggatctcacactctatccagctcggcaaccaaaaccagatcgagacatgtaatcagtctgtaatcacgtacgagaacaacacctgggtcaatcagacctatgtaaatatatcaaacaccaatttcgccgccgggcaatctgtggtgagcgtgaaacttgctggcaattcttccctctgtcctgtgtcaggttgggctatttactctaaggataatagcgtccggatcgggtccaagggcgacgtgttcgtcatccgcgagccttttatttcctgctcaccgctggagtgtcgcaccttctttctgacccagggggccttgctcaacgacaaacacagcaatgggacaataaaagaccggtctccctatcgcactctgatgagctgccccatcggtgaggttccgtctccttataatagtagatttgaaagtgtggcgtggtctgcaagcgcatgccatgacgggataaattggctgactatagggattagtggaccagataatggggctgtcgcggtcctgaagtataatgggatcattactgacacaataaagtcatggcggaataatattctcagaacacaggagagcgagtgtgcatgcgtaaacgggagctgcttcactgtgatgacagatggaccctctaatggacaggcttcttacaagatttttaggatcgaaaagggaaagatcgttaaaagtgtggagatgaatgctccaaattatcattacgaggagtgctcctgttaccctgattcatccgaaatcacttgtgtatgtcgggataactggcacggcagcaatcgcccctgggttagcttcaaccaaaacctggagtaccagattggctatatctgtagtggaatcttcggggacaacccaagacccaacgataagacgggctcctgcggaccagtaagctctaacggggcaaacggtgtaaagggtttcagcttcaaatacggtaacggtgtatggatagggcggacaaaaagtatctctagtcgaaatggcttcgagatgatctgggaccctaacggctggactggcactgacaacaatttctccatcaagcaggatatcgttggaatcaacgagtggtctggatactccggctcatttgttcaacatccagagctgacaggtctggattgcatccgaccttgtttttgggtcgaactgatccgaggccgccccaaagagaatacaatatggacatccggatcatctatctcattctgtggagtgaactcagacaccgtaggctggtcatggccggatggggctgagcttccttttacaatagacaag

SEQ ID NO: 23 - protein, 469 aa, Influenza A virus
MNPNQKIITIGSVCMTIGMANLILQIGNIISIWISHSIQLGNQNQIETCNQSVITYENNTWVNQTYVNISNTNFAAGQSVVSVKLAGNSSLCPVSGWAIYSKDNSVRIGSKGDVFVIREPFISCSPLECRTFFLTQGALLNDKHSNGTIKDRSPYRTLMSCPIGEVPSPYNSRFESVAWSASACHDGINWLTIGISGPDNGAVAVLKYNGIITDTIKSWRNNILRTQESECACVNGSCFTVMTDGPSNGQASYKIFRIEKGKIVKSVEMNAPNYHYEECSCYPDSSEITCVCRDNWHGSNRPWVSFNQNLEYQIGYICSGIFGDNPRPNDKTGSCGPVSSNGANGVKGFSFKYGNGVWIGRTKSISSRNGFEMIWDPNGWTGTDNNFSIKQDIVGINEWSGYSGSFVQHPELTGLDCIRPCFWVELIRGRPKENTIWTSGSSISFCGVNSDTVGWSWPDGAELPFTIDK

SEQ ID NO: 24 - DNA, 5837 bp, Influenza A virus
gacgaaagggcctcgtgatacgcctatttttataggttaatgtcatgataataatggtttcttagacgtcaggtggcacttttcggggaaatgtgcgcggaacccctatttgtttatttttctaaatacattcaaatatgtatccgctcatgagacaataaccctgataaatgcttcaataatggggggggggggaaagccacgttgtgtctcaaaatctctgatgttacattgcacaagataaaaatatatcatcatgaacaataaaactgtctgcttacataaacagtaatacaaggggtgttatgagccatattcaacgggaaacgtcttgctcgaggccgcgattaaattccaacatggatgctgatttatatgggtataaatgggctcgcgataatgtcgggcaatcaggtgcgacaatctatcgattgtatgggaagcccgatgcgccagagttgtttctgaaacatggcaaaggtagcgttgccaatgatgttacagatgagatggtcagactaaactggctgacggaatttatgcctcttccgaccatcaagcattttatccgtactcctgatgatgcatggttactcaccactgcgatccccgggaaaacagcattccaggtattagaagaatatcctgattcaggtgaaaatattgttgatgcgctggcagtgttcctgcgccggttgcattcgattcctgtttgtaattgtccttttaacagcgatcgcgtatttcgtctcgctcaggcgcaatcacgaatgaataacggtttggttgatgcgagtgattttgatgacgagcgtaatggctggcctgttgaacaagtctggaaagaaatgcataagcttttgccattctcaccggattcagtcgtcactcatggtgatttctcacttgataaccttatttttgacgaggggaaattaataggttgtattgatgttggacgagtcggaatcgcagaccgataccaggatcttgccatcctatggaactgcctcggtgagttttctccttcattacagaaacggctttttcaaaaatatggtattgataatcctgatatgaataaattgcagtttcatttgatgctcgatgagtttttctaatcagaattggttaattggttgtaacactggcagagcattacgctgacttgacgggacggcggctttgttgaataaatcgaacttttgctgagttgaaggatcagatcacgcatcttcccgacaacgcagaccgttccgtggcaaagcaaaagttcaaaatcaccaactggtccacctacaacaaagctctcatcaaccgtggctccctcactttctggctggatgatggggcgattcaggcctggtatgagtcagcaacaccttcttcacgaggcagacctcagcgccccccccccccgagtcaggcaactatggatgaacgaaatagacagatcgctgagataggtgcctcactgattaagcattggtaactgtcagaccaagtttactcatatatactttagattgatttaaaacttcatttttaatttaaaaggatctaggtgaagatcctttttgataatctcatgaccaaaatcccttaacgtgagttttcgttccactgagcgtcagaccccgtagaaaagatcaaaggatcttcttgagatcctttttttctgcgcgtaatctgctgcttgcaaacaaaaaaaccaccgctaccagcggtggtttgtttgccggatcaagagctaccaactctttttccgaaggtaactggcttcagcagagcgcagataccaaatactgttcttctagtgtagccgtagttaggccaccacttcaagaactctgtagcaccgcctacatacctcgctctgctaatcctgttaccagtggctgctgccagtggcgataagtcgtgtcttaccgggttggactcaagacgatagttaccggataaggcgcagcggtcgggctgaacggggggttcgtgcacacagcccagcttggagcgaacgacctacaccgaactgagatacctacagcgtgagctatgagaaagcgccacgcttcccgaagggagaaaggcggacaggtatccggtaagcggcagggtcggaacaggagagcgcacgagggagcttccagggggaaacgcctggtatctttatagtcctgtcgggtttcgccacctctgacttgagcgtcgatttttgtgatgctcgtcaggggggcggagcctatggaaaaacgccagcaacgcggcctttttacggttcctggccttttgctggccttttgctcacatgttctttcctgcgttatcccctgattctgtggataaccgtattaccgcctttgagtgagctgataccgctcgccgcagccgaacgaccgagcgcagcgagtcagtgagcgaggaagcggaagattaaggccatgatggccttaaatcatggccttaaaattctatgatttctctcattacttcctcacatgttggaggcattttctctccctctgcacttaatagcctatcttgctttaatttcttcccactcttggaggctaggtttggtttggtgggctgatgagggagggagagaccgctccaagtactttagcgggtgggattgaaggcggagccctcctgagctatgagtgtcctatgagtggggctggaactaagaaccaggggcgtggacagggtgtgtcacagagaaggggatgtgcctgcttctttctggcccaggaggaaccgggtcaattcttcagcacctgggtacccatagagcccaccgcatccccagcatgcctgctattgtcttcccaatcctcccccttgctgtcctgccccaccccaccccccagaatagaatgacacctactcagacaatgcgatgcaatttcctcattttattaggaaaggacagtgggagtggcaccttccagggtcaaggaaggcacgggggaggggcaaacaacagatggctggcaactagaaggcacagcagatctggatcccacgtgttcatcacttgtctattgtaaaaggaagctcagccccatccggccatgaccagcctacggtgtctgagttcactccacagaatgagatagatgatccggatgtccatattgtattctctttggggcggcctcggatcagttcgacccaaaaacaaggtcggatgcaatccagacctgtcagctctggatgttgaacaaatgagccggagtatccagaccactcgttgattccaacgatatcctgcttgatggagaaattgttgtcagtgccagtccagccgttagggtcccagatcatctcgaagccatttcgactagagatactttttgtccgccctatccatacaccgttaccgtatttgaagctgaaaccctttacaccgtttgccccgttagagcttactggtccgcaggagcccgtcttatcgttgggtcttgggttgtccccgaagattccactacagatatagccaatctggtactccaggttttggttgaagctaacccaggggcgattgctgccgtgccagttatcccgacatacacaagtgatttcggatgaatcagggtaacaggagcactcctcgtaatgataatttggagcattcatctccacacttttaacgatctttcccttttcgatcctaaaaatcttgtaagaagcctgtccattagagggtccatctgtcatcacagtgaagcagctcccgtttacgcatgcacactcgctctcctgtgttctgagaatattattccgccatgactttattgtgtcagtaatgatcccattatacttcaggaccgcgacagccccattatctggtccactaatccctatagtcagccaatttatcccgtcatggcatgcgcttgcagaccacgccacactttcaaatctactattataaggagacggaacctcaccgatggggcagctcatcagagtgcgatagggagaccggtcttttattgtcccattgctgtgtttgtcgttgagcaaggccccctgggtcagaaagaaggtgcgacactccagcggtgagcaggaaataaaaggctcgcggatgacgaacacgtcgcccttggacccgatccggacgctattatccttagagtaaatagcccaacctgacacaggacagagggaagaattgccagcaagtttcacgctcaccacagattgcccggcggcgaaattggtgtttgatatatttacataggtctgattgacccaggtgttgttctcgtacgtgattacagactgattacatgtctcgatctggttttggttgccgagctggatagagtgtgagatccagatactaatgatgttcccgatttggagaatgaggttagccattcctatagtcatacagacgctccctatggtaataattttctgattaggattcatggtggcgatatctctagagcggccgcgatatctgatcacacgtgtcgacgacggtgactgcagaaaagacccatggaaaggaacagtctgttagtctgtcagctattatgtctggtggcgcgcgcggcagcaacgagtactgctcagactacactgccctccaccgttaactagagttgagcaagcagggtcaggcaaagcgtggagagccggctgagtctaggtaggctccaagggagcgccggacaaaggcccggtctcgacctgagctttaaacttacctagacggcggacgcagttcaggaggcaccacaggcgggaggcggcagaacgcgactcaaccggcgtggatggcggcctcaggtagggcggcgggcgcgtgaaggagagatgcgagccgatggaggctggatcggtcccggtgtcttctatggaggtcaaaacagcgtggatggcgtctccaggcgatctgacggttcactaaacgagctctgcttatatagacctcccaccgtacacgcctaccgcccatttgcgtcaatggggcggagttgttacgacattttggaaagtcccgttgattttggtgccaaaacaaactcccattgacgtcaatggggtggagacttggaaatccccgtgagtcaaaccgctatccacgcccattgatgtactgccaaaaccgcatcaccatggtaatagcgatgactaatacgtagatgtactgccaagtaggaaagtcccataaggtcatgtactgggcataatgccaggcgggccatttaccgtcattgacgtcaatagggggcgtacttggcatatgatacacttgatgtactgccaagtgggcagtttaccgtaaatactccacccattgacgtcaatggaaagtccctattggcgttactatgggaacatacgtcattattgacgtcaatgggcgggggtcgttgggcggtcagccaggcgggccatttaccgtaagttatgtaacgcggaactccatatatgggctatgaactaatgaccccgtaattgattactattaataactagtcaataatcaatgtcaacatggcggtaatgttggacatgagccaatataaatgtacatattatgatatggatacaacgtatgcaatggccaatagccaatctgatgcggtattttctccttacgcatctgtgcggtatttcacaccgcatatggtgcactctcagtacaatctgctctgatgccgcatagttaagccagccccgacacccgccaacacccgctgacgcgccctgacgggcttgtctgctcccggcatccgcttacagacaagctgtgaccgtctccgggagctgcatgtgtcagaggttttcaccgtcatcaccgaaacgcgcga

SEQ ID NO: 25 - DNA, 6117 bp, Influenza A virus
tcgcgcgtttcggtgatgacggtgaaaacctctgacacatgcagctcccggagacggtcacagcttgtctgtaagcggatgccgggagcagacaagcccgtcagggcgcgtcagcgggtgttggcgggtgtcggggctggcttaactatgcggcatcagagcagattgtactgagagtgcaccatatgcggtgtgaaataccgcacagatgcgtaaggagaaaataccgcatcagattggctattggccattgcatacgttgtatccatatcataatatgtacatttatattggctcatgtccaacattaccgccatgttgacattgattattgactagttattaatagtaatcaattacggggtcattagttcatagcccatatatggagttccgcgttacataacttacggtaaatggcccgcctggctgaccgcccaacgacccccgcccattgacgtcaataatgacgtatgttcccatagtaacgccaatagggactttccattgacgtcaatgggtggagtatttacggtaaactgcccacttggcagtacatcaagtgtatcatatgccaagtacgccccctattgacgtcaatgacggtaaatggcccgcctggcattatgcccagtacatgaccttatgggactttcctacttggcagtacatctacgtattagtcatcgctattaccatggtgatgcggttttggcagtacatcaatgggcgtggatagcggtttgactcacggggatttccaagtctccaccccattgacgtcaatgggagtttgttttggcaccaaaatcaacgggactttccaaaatgtcgtaacaactccgccccattgacgcaaatgggcggtaggcgtgtacggtgggaggtctatataagcagagctcgtttagtgaaccgtcagatcgcctggagacgccatccacgctgttttgacctccatagaagacaccgggaccgatccagcctccatcggctcgcatctctccttcacgcgcccgccgccctacctgaggccgccatccacgccggttgagtcgcgttctgccgcctcccgcctgtggtgcctcctgaactgcgtccgccgtctaggtaagtttaaagctcaggtcgagaccgggcctttgtccggcgctcccttggagcctacctagactcagccggctctccacgctttgcctgaccctgcttgctcaactctagttaacggtggagggcagtgtagtctgagcagtactcgttgctgccgcgcgcgccaccagacataatagctgacagactaacagactgttcctttccatgggtcttttctgcagtcaccgtcgtcgacacgtgtgatcagatatcgcggccgctctagagatatcgccaccatgaaggctattttggtcgtgctcctgtacacctttgccacagccaatgccgataccctttgtattggctaccatgcaaacaactctaccgatacggtcgacacggtgctcgaaaagaatgttactgtcacccactctgtgaacttgctggaggataaacacaatggcaagctctgcaaactgcgaggggtggctcccctgcatctgggaaaatgtaatattgccggctggatactgggtaatccagaatgcgaatccttgagtacggcatccagttggtcctatatcgtcgagaccccgtcaagtgacaatgggacctgctacccaggcgacttcattgattatgaagagctgagggagcagttgtcatccgtaagcagcttcgaaaggtttgagattttcccgaaaactagctcctggcccaatcatacaaacaaaggagttactgcagcctgtcctcatgcgggcgcgaaaagcttctacaagaacctgatatggctcgtgaagaaaggcaattcatacccaaacctgtctaagagctacataaacgataaagggaaagaggttctggtgctttggggcatacaccacccatctacctcagccgaccagcagtctctgtatcagaacgccgacacatacgtgtttgtgggcagctcccgctattctaagaagttcaaacccgagatcgccatcagaccaaaggtgagagaccaggaaggaaggatgaattattactggaccttggtcgaacctggcgataagataacgtttgaggctacgggcaacctggtcgtgccgagatatgcttttgccatggagaggaatgcggggagcggaattatcatcagcgacactccagttcatgactgtaataccacatgtcagacaccgaagggcgccatcaacacgagcttgccctttcagaatatacatccaatcacaatcggaaaatgccccaagtacgtgaaaagcactaaactgagactcgccaccggactcaggaatatcccaagcatccagtcacggggtctgttcggcgctatcgccggatttattgaaggcggctggacggggatggtggacggttggtacggctaccatcatcaaaatgagcagggctccggatacgccgctgacctgaaatctacgcagaatgccatagatgagatcacaaacaaggtcaatagtgtgatagaaaaaatgaatactcagttcacagctgttggaaaggagtttaaccacctcgagaagcgaattgagaacctgaacaagaaggtggacgatggctttttggatatctggacgtataacgctgagctgcttgttctgctggagaacgaaagaacccttgactaccacgattccaacgtgaagaatctgtatgagaaagtgcgaagccagttgaaaaacaacgcaaaagaaataggcaacggctgtttcgagttctaccacaaatgcgataacacctgcatggagagtgtgaagaacggaacgtacgattatccaaaatactccgaggaggccaaactcaatagggaggagatagacggtgttaagctggagtccacacgcatctatcagattctggcgatctactctactgtggcttccagcctggtgctggtcgtttcccttggggcgatcagcttctggatgtgcagcaatggctccctgcaatgccgcatctgcatctgataggatccagatctgctgtgccttctagttgccagccatctgttgtttgcccctcccccgtgccttccttgaccctggaaggtgccactcccactgtcctttcctaataaaatgaggaaattgcatcgcattgtctgagtaggtgtcattctattctggggggtggggtggggcaggacagcaagggggaggattgggaagacaatagcaggcatgctggggatgcggtgggctctatgggtacccaggtgctgaagaattgacccggttcctcctgggccagaaagaagcaggcacatccccttctctgtgacacaccctgtccacgcccctggttcttagttccagccccactcataggacactcatagctcaggagggctccgccttcaatcccacccgctaaagtacttggagcggtctctccctccctcatcagcccaccaaaccaaacctagcctccaagagtgggaagaaattaaagcaagataggctattaagtgcagagggagagaaaatgcctccaacatgtgaggaagtaatgagagaaatcatagaattttaaggccatgatttaaggccatcatggccttaatcttccgcttcctcgctcactgactcgctgcgctcggtcgttcggctgcggcgagcggtatcagctcactcaaaggcggtaatacggttatccacagaatcaggggataacgcaggaaagaacatgtgagcaaaaggccagcaaaaggccaggaaccgtaaaaaggccgcgttgctggcgtttttccataggctccgcccccctgacgagcatcacaaaaatcgacgctcaagtcagaggtggcgaaacccgacaggactataaagataccaggcgtttccccctggaagctccctcgtgcgctctcctgttccgaccctgccgcttaccggatacctgtccgcctttctcccttcgggaagcgtggcgctttctcatagctcacgctgtaggtatctcagttcggtgtaggtcgttcgctccaagctgggctgtgtgcacgaaccccccgttcagcccgaccgctgcgccttatccggtaactatcgtcttgagtccaacccggtaagacacgacttatcgccactggcagcagccactggtaacaggattagcagagcgaggtatgtaggcggtgctacagagttcttgaagtggtggcctaactacggctacactagaagaacagtatttggtatctgcgctctgctgaagccagttaccttcggaaaaagagttggtagctcttgatccggcaaacaaaccaccgctggtagcggtggtttttttgtttgcaagcagcagattacgcgcagaaaaaaaggatctcaagaagatcctttgatcttttctacggggtctgacgctcagtggaacgaaaactcacgttaagggattttggtcatgagattatcaaaaaggatcttcacctagatccttttaaattaaaaatgaagttttaaatcaatctaaagtatatatgagtaaacttggtctgacagttaccaatgcttaatcagtgaggcacctatctcagcgatctgtctatttcgttcatccatagttgcctgactcggggggggggggcgctgaggtctgcctcgtgaagaaggtgttgctgactcataccaggcctgaatcgccccatcatccagccagaaagtgagggagccacggttgatgagagctttgttgtaggtggaccagttggtgattttgaacttttgctttgccacggaacggtctgcgttgtcgggaagatgcgtgatctgatccttcaactcagcaaaagttcgatttattcaacaaagccgccgtcccgtcaagtcagcgtaatgctctgccagtgttacaaccaattaaccaattctgattagaaaaactcatcgagcatcaaatgaaactgcaatttattcatatcaggattatcaataccatatttttgaaaaagccgtttctgtaatgaaggagaaaactcaccgaggcagttccataggatggcaagatcctggtatcggtctgcgattccgactcgtccaacatcaatacaacctattaatttcccctcgtcaaaaataaggttatcaagtgagaaatcaccatgagtgacgactgaatccggtgagaatggcaaaagcttatgcatttctttccagacttgttcaacaggccagccattacgctcgtcatcaaaatcactcgcatcaaccaaaccgttattcattcgtgattgcgcctgagcgagacgaaatacgcgatcgctgttaaaaggacaattacaaacaggaatcgaatgcaaccggcgcaggaacactgccagcgcatcaacaatattttcacctgaatcaggatattcttctaatacctggaatgctgttttcccggggatcgcagtggtgagtaaccatgcatcatcaggagtacggataaaatgcttgatggtcggaagaggcataaattccgtcagccagtttagtctgaccatctcatctgtaacatcattggcaacgctacctttgccatgtttcagaaacaactctggcgcatcgggcttcccatacaatcgatagattgtcgcacctgattgcccgacattatcgcgagcccatttatacccatataaatcagcatccatgttggaatttaatcgcggcctcgagcaagacgtttcccgttgaatatggctcataacaccccttgtattactgtttatgtaagcagacagttttattgttcatgatgatatatttttatcttgtgcaatgtaacatcagagattttgagacacaacgtggctttccccccccccccattattgaagcatttatcagggttattgtctcatgagcggatacatatttgaatgtatttagaaaaataaacaaataggggttccgcgcacatttccccgaaaagtgccacctgacgtctaagaaaccattattatcatgacattaacctataaaaataggcgtatcacgaggccctttcgtc

SEQ ID NO: 26 - DNA, 1695 bp, Influenza A virus
  CDS (1)..(1695)
atgaaggctattttggtcgtgctcctgtacacctttgccacagccaatgccgataccctttgtattggctaccatgcaaacaactctaccgatacggtcgacacggtgctcgaaaagaatgttactgtcacccactctgtgaacttgctggaggataaacacaatggcaagctctgcaaactgcgaggggtggctcccctgcatctgggaaaatgtaatattgccggctggatactgggtaatccagaatgcgaatccttgagtacggcatccagttggtcctatatcgtcgagaccccgtcaagtgacaatgggacctgctacccaggcgacttcattgattatgaagagctgagggagcagttgtcatccgtaagcagcttcgaaaggtttgagattttcccgaaaactagctcctggcccaatcatacaaacaaaggagttactgcagcctgtcctcatgcgggcgcgaaaagcttctacaagaacctgatatggctcgtgaagaaaggcaattcatacccaaacctgtctaagagctacataaacgataaagggaaagaggttctggtgctttggggcatacaccacccatctacctcagccgaccagcagtctctgtatcagaacgccgacacatacgtgtttgtgggcagctcccgctattctaagaagttcaaacccgagatcgccatcagaccaaaggtgagagaccaggaaggaaggatgaattattactggaccttggtcgaacctggcgataagataacgtttgaggctacgggcaacctggtcgtgccgagatatgcttttgccatggagaggaatgcggggagcggaattatcatcagcgacactccagttcatgactgtaataccacatgtcagacaccgaagggcgccatcaacacgagcttgccctttcagaatatacatccaatcacaatcggaaaatgccccaagtacgtgaaaagcactaaactgagactcgccaccggactcaggaatatcccaagcatccagtcacggggtctgttcggcgctatcgccggatttattgaaggcggctggacggggatggtggacggttggtacggctaccatcatcaaaatgagcagggctccggatacgccgctgacctgaaatctacgcagaatgccatagatgagatcacaaacaaggtcaatagtgtgatagaaaaaatgaatactcagttcacagctgttggaaaggagtttaaccacctcgagaagcgaattgagaacctgaacaagaaggtggacgatggctttttggatatctggacgtataacgctgagctgcttgttctgctggagaacgaaagaacccttgactaccacgattccaacgtgaagaatctgtatgagaaagtgcgaagccagttgaaaaacaacgcaaaagaaataggcaacggctgtttcgagttctaccacaaatgcgataacacctgcatggagagtgtgaagaacggaacgtacgattatccaaaatactccgaggaggccaaactcaatagggaggagatagacggtgttaagctggagtccacacgcatctatcagattctggcgatctactctactgtggcttccagcctggtgctggtcgtttcccttggggcgatcagcttctggatgtgcagcaatggctccctgcaatgccgcatctgcatc

SEQ ID NO: 27 - protein, 565 aa, Influenza A virus
MKAILVVLLYTFATANADTLCIGYHANNSTDTVDTVLEKNVTVTHSVNLLEDKHNGKLCKLRGVAPLHLGKCNIAGWILGNPECESLSTASSWSYIVETPSSDNGTCYPGDFIDYEELREQLSSVSSFERFEIFPKTSSWPNHTNKGVTAACPHAGAKSFYKNLIWLVKKGNSYPNLSKSYINDKGKEVLVLWGIHHPSTSADQQSLYQNADTYVFVGSSRYSKKFKPEIAIRPKVRDQEGRMNYYWTLVEPGDKITFEATGNLVVPRYAFAMERNAGSGIIISDTPVHDCNTTCQTPKGAINTSLPFQNIHPITIGKCPKYVKSTKLRLATGLRNIPSIQSRGLFGAIAGFIEGGWTGMVDGWYGYHHQNEQGSGYAADLKSTQNAIDEITNKVNSVIEKMNTQFTAVGKEFNHLEKRIENLNKKVDDGFLDIWTYNAELLVLLENERTLDYHDSNVKNLYEKVRSQLKNNAKEIGNGCFEFYHKCDNTCMESVKNGTYDYPKYSEEAKLNREEIDGVKLESTRIYQILAIYSTVASSLVLVVSLGAISFWMCSNGSLQCRICI

SEQ ID NO: 28 - DNA, 6117 bp, Influenza A virus
gacgaaagggcctcgtgatacgcctatttttataggttaatgtcatgataataatggtttcttagacgtcaggtggcacttttcggggaaatgtgcgcggaacccctatttgtttatttttctaaatacattcaaatatgtatccgctcatgagacaataaccctgataaatgcttcaataatggggggggggggaaagccacgttgtgtctcaaaatctctgatgttacattgcacaagataaaaatatatcatcatgaacaataaaactgtctgcttacataaacagtaatacaaggggtgttatgagccatattcaacgggaaacgtcttgctcgaggccgcgattaaattccaacatggatgctgatttatatgggtataaatgggctcgcgataatgtcgggcaatcaggtgcgacaatctatcgattgtatgggaagcccgatgcgccagagttgtttctgaaacatggcaaaggtagcgttgccaatgatgttacagatgagatggtcagactaaactggctgacggaatttatgcctcttccgaccatcaagcattttatccgtactcctgatgatgcatggttactcaccactgcgatccccgggaaaacagcattccaggtattagaagaatatcctgattcaggtgaaaatattgttgatgcgctggcagtgttcctgcgccggttgcattcgattcctgtttgtaattgtccttttaacagcgatcgcgtatttcgtctcgctcaggcgcaatcacgaatgaataacggtttggttgatgcgagtgattttgatgacgagcgtaatggctggcctgttgaacaagtctggaaagaaatgcataagcttttgccattctcaccggattcagtcgtcactcatggtgatttctcacttgataaccttatttttgacgaggggaaattaataggttgtattgatgttggacgagtcggaatcgcagaccgataccaggatcttgccatcctatggaactgcctcggtgagttttctccttcattacagaaacggctttttcaaaaatatggtattgataatcctgatatgaataaattgcagtttcatttgatgctcgatgagtttttctaatcagaattggttaattggttgtaacactggcagagcattacgctgacttgacgggacggcggctttgttgaataaatcgaacttttgctgagttgaaggatcagatcacgcatcttcccgacaacgcagaccgttccgtggcaaagcaaaagttcaaaatcaccaactggtccacctacaacaaagctctcatcaaccgtggctccctcactttctggctggatgatggggcgattcaggcctggtatgagtcagcaacaccttcttcacgaggcagacctcagcgccccccccccccgagtcaggcaactatggatgaacgaaatagacagatcgctgagataggtgcctcactgattaagcattggtaactgtcagaccaagtttactcatatatactttagattgatttaaaacttcatttttaatttaaaaggatctaggtgaagatcctttttgataatctcatgaccaaaatcccttaacgtgagttttcgttccactgagcgtcagaccccgtagaaaagatcaaaggatcttcttgagatcctttttttctgcgcgtaatctgctgcttgcaaacaaaaaaaccaccgctaccagcggtggtttgtttgccggatcaagagctaccaactctttttccgaaggtaactggcttcagcagagcgcagataccaaatactgttcttctagtgtagccgtagttaggccaccacttcaagaactctgtagcaccgcctacatacctcgctctgctaatcctgttaccagtggctgctgccagtggcgataagtcgtgtcttaccgggttggactcaagacgatagttaccggataaggcgcagcggtcgggctgaacggggggttcgtgcacacagcccagcttggagcgaacgacctacaccgaactgagatacctacagcgtgagctatgagaaagcgccacgcttcccgaagggagaaaggcggacaggtatccggtaagcggcagggtcggaacaggagagcgcacgagggagcttccagggggaaacgcctggtatctttatagtcctgtcgggtttcgccacctctgacttgagcgtcgatttttgtgatgctcgtcaggggggcggagcctatggaaaaacgccagcaacgcggcctttttacggttcctggccttttgctggccttttgctcacatgttctttcctgcgttatcccctgattctgtggataaccgtattaccgcctttgagtgagctgataccgctcgccgcagccgaacgaccgagcgcagcgagtcagtgagcgaggaagcggaagattaaggccatgatggccttaaatcatggccttaaaattctatgatttctctcattacttcctcacatgttggaggcattttctctccctctgcacttaatagcctatcttgctttaatttcttcccactcttggaggctaggtttggtttggtgggctgatgagggagggagagaccgctccaagtactttagcgggtgggattgaaggcggagccctcctgagctatgagtgtcctatgagtggggctggaactaagaaccaggggcgtggacagggtgtgtcacagagaaggggatgtgcctgcttctttctggcccaggaggaaccgggtcaattcttcagcacctgggtacccatagagcccaccgcatccccagcatgcctgctattgtcttcccaatcctcccccttgctgtcctgccccaccccaccccccagaatagaatgacacctactcagacaatgcgatgcaatttcctcattttattaggaaaggacagtgggagtggcaccttccagggtcaaggaaggcacgggggaggggcaaacaacagatggctggcaactagaaggcacagcagatctggatcctatcagatgcagatgcggcattgcagggagccattgctgcacatccagaagctgatcgccccaagggaaacgaccagcaccaggctggaagccacagtagagtagatcgccagaatctgatagatgcgtgtggactccagcttaacaccgtctatctcctccctattgagtttggcctcctcggagtattttggataatcgtacgttccgttcttcacactctccatgcaggtgttatcgcatttgtggtagaactcgaaacagccgttgcctatttcttttgcgttgtttttcaactggcttcgcactttctcatacagattcttcacgttggaatcgtggtagtcaagggttctttcgttctccagcagaacaagcagctcagcgttatacgtccagatatccaaaaagccatcgtccaccttcttgttcaggttctcaattcgcttctcgaggtggttaaactcctttccaacagctgtgaactgagtattcattttttctatcacactattgaccttgtttgtgatctcatctatggcattctgcgtagatttcaggtcagcggcgtatccggagccctgctcattttgatgatggtagccgtaccaaccgtccaccatccccgtccagccgccttcaataaatccggcgatagcgccgaacagaccccgtgactggatgcttgggatattcctgagtccggtggcgagtctcagtttagtgcttttcacgtacttggggcattttccgattgtgattggatgtatattctgaaagggcaagctcgtgttgatggcgcccttcggtgtctgacatgtggtattacagtcatgaactggagtgtcgctgatgataattccgctccccgcattcctctccatggcaaaagcatatctcggcacgaccaggttgcccgtagcctcaaacgttatcttatcgccaggttcgaccaaggtccagtaataattcatccttccttcctggtctctcacctttggtctgatggcgatctcgggtttgaacttcttagaatagcgggagctgcccacaaacacgtatgtgtcggcgttctgatacagagactgctggtcggctgaggtagatgggtggtgtatgccccaaagcaccagaacctctttccctttatcgtttatgtagctcttagacaggtttgggtatgaattgcctttcttcacgagccatatcaggttcttgtagaagcttttcgcgcccgcatgaggacaggctgcagtaactcctttgtttgtatgattgggccaggagctagttttcgggaaaatctcaaacctttcgaagctgcttacggatgacaactgctccctcagctcttcataatcaatgaagtcgcctgggtagcaggtcccattgtcacttgacggggtctcgacgatataggaccaactggatgccgtactcaaggattcgcattctggattacccagtatccagccggcaatattacattttcccagatgcaggggagccacccctcgcagtttgcagagcttgccattgtgtttatcctccagcaagttcacagagtgggtgacagtaacattcttttcgagcaccgtgtcgaccgtatcggtagagttgtttgcatggtagccaatacaaagggtatcggcattggctgtggcaaaggtgtacaggagcacgaccaaaatagccttcatggtggcgatatctctagagcggccgcgatatctgatcacacgtgtcgacgacggtgactgcagaaaagacccatggaaaggaacagtctgttagtctgtcagctattatgtctggtggcgcgcgcggcagcaacgagtactgctcagactacactgccctccaccgttaactagagttgagcaagcagggtcaggcaaagcgtggagagccggctgagtctaggtaggctccaagggagcgccggacaaaggcccggtctcgacctgagctttaaacttacctagacggcggacgcagttcaggaggcaccacaggcgggaggcggcagaacgcgactcaaccggcgtggatggcggcctcaggtagggcggcgggcgcgtgaaggagagatgcgagccgatggaggctggatcggtcccggtgtcttctatggaggtcaaaacagcgtggatggcgtctccaggcgatctgacggttcactaaacgagctctgcttatatagacctcccaccgtacacgcctaccgcccatttgcgtcaatggggcggagttgttacgacattttggaaagtcccgttgattttggtgccaaaacaaactcccattgacgtcaatggggtggagacttggaaatccccgtgagtcaaaccgctatccacgcccattgatgtactgccaaaaccgcatcaccatggtaatagcgatgactaatacgtagatgtactgccaagtaggaaagtcccataaggtcatgtactgggcataatgccaggcgggccatttaccgtcattgacgtcaatagggggcgtacttggcatatgatacacttgatgtactgccaagtgggcagtttaccgtaaatactccacccattgacgtcaatggaaagtccctattggcgttactatgggaacatacgtcattattgacgtcaatgggcgggggtcgttgggcggtcagccaggcgggccatttaccgtaagttatgtaacgcggaactccatatatgggctatgaactaatgaccccgtaattgattactattaataactagtcaataatcaatgtcaacatggcggtaatgttggacatgagccaatataaatgtacatattatgatatggatacaacgtatgcaatggccaatagccaatctgatgcggtattttctccttacgcatctgtgcggtatttcacaccgcatatggtgcactctcagtacaatctgctctgatgccgcatagttaagccagccccgacacccgccaacacccgctgacgcgccctgacgggcttgtctgctcccggcatccgcttacagacaagctgtgaccgtctccgggagctgcatgtgtcagaggttttcaccgtcatcaccgaaacgcgcga

SEQ ID NO: 29 - DNA, 6124 bp, Influenza A virus
tcgcgcgtttcggtgatgacggtgaaaacctctgacacatgcagctcccggagacggtcacagcttgtctgtaagcggatgccgggagcagacaagcccgtcagggcgcgtcagcgggtgttggcgggtgtcggggctggcttaactatgcggcatcagagcagattgtactgagagtgcaccatatgcggtgtgaaataccgcacagatgcgtaaggagaaaataccgcatcagattggctattggccattgcatacgttgtatccatatcataatatgtacatttatattggctcatgtccaacattaccgccatgttgacattgattattgactagttattaatagtaatcaattacgggaacttccatagcccatatatggagttccgcgttacataacttacgggaatttccaaacctggctgaccgcccaacgacccccgcccattgacgtcaataatgacgtatgttcccatagtaacgccaatagggaacttccattgacgtcaatgggtggagtatttacggtaaactgcccacttgggaatttccaagtgtatcatatgccaagtacgccccctattgacgtcaatgacgggaacttccataagcttgcattatgcccagtacatgaccttatgggaatttcctacttggcagtacatctacgtattagtcatcgctattaccatggtgatgcggttttggcagtacatcaatgggcgtggatagcggtttgactcacgggaacttccaagtctccaccccattgacgtcaatgggagtttgttttgactcaccaaaatcaacgggaattcccaaaatgtcgtaacaactccgccccattgacgcaaatgggcggtaggcgtgtacggtgggaggtctatataagcagagctcgtttagtgaaccgtcagatcgcctggagacgccatccacgctgttttgacctccatagaagacaccgggaccgatccagcctccatcggctcgcatctctccttcacgcgcccgccgccctacctgaggccgccatccacgccggttgagtcgcgttctgccgcctcccgcctgtggtgcctcctgaactgcgtccgccgtctaggtaagtttaaagctcaggtcgagaccgggcctttgtccggcgctcccttggagcctacctagactcagccggctctccacgctttgcctgaccctgcttgctcaactctagttaacggtggagggcagtgtagtctgagcagtactcgttgctgccgcgcgcgccaccagacataatagctgacagactaacagactgttcctttccatgggtcttttctgcagtcaccgtcgtcgacacgtgtgatcagatatcgcggccgctctagagatatcgccaccatggaagccagactgctggtgctgctgtgtgcctttgccgccacaaatgcagatacaatctgtattggctaccacgccaacaatagcaccgataccgtggatacagtgctggagaagaatgtgaccgtgacccactctgtgaatctgctggaggatagccacaatggcaagctgtgtaagctgaaaggaattgcccctctgcagctgggcaaatgtaatattgccggctggctgctgggaaatcctgaatgtgatctgctgctgacagccagcagctggtcttatatcgtggagaccagcaatagcgagaatggcacctgttaccctggcgacttcatcgattacgaggagctgagagaacagctgtctagcgtgtccagcttcgagaagttcgagatcttccctaagacaagcagctggcctaatcacacaacaaagggagtgacagccgcctgttcttatgccggagccagctccttttacagaaacctgctgtggctgacaaagaagggcagcagctaccctaacctgtctaagagctacgtgaacaacaagggcaaagaagtgctggtgctgtggggagtgcaccaccctcctacaggaacagatcagcagagcctgtaccagaatgccgatgcctatgtgtctgtgggcagcagcaagtacaacagaagattcacccctgaaattgccgccagacccaaagtgagagatcaggccggcagaatgaattactactggaccctgctggaacctggcgataccatcacatttgaggccaccggaaatctgattgccccttggtatgcctttgccctgaatagaggctctggctctggcatcattacatctgatgcccctgtgcacgactgtaataccaagtgtcagacacctcacggcgccattaatagcagcctgcccttccagaatattcaccctgtgaccatcggcgagtgtcctaagtatgtgaggagcaccaaactgagaatggccaccggcctgagaaatatccctagcatccagagcagaggactgtttggagccatcgccggctttattgagggaggatggaccggaatgatcgatggctggtacggctatcaccaccagaatgagcagggatctggatatgccgccgatcagaagtctacacagaacgccatcgacggcatcacaaacaaggtgaacagcgtgatcgagaagatgaacacccagtttacagctgtgggcaaggagttcaacaacctggagcggagaatcgagaacctgaacaagaaagtggacgacggcttcctggatatttggacctacaatgccgagctgctcgtgctcctggagaatgagagaaccctggacttccacgacagcaatgtgagaaacctgtacgagaaggtgaagagccagctgaagaacaatgccaaggagatcggcaacggctgctttgagttctaccacaagtgtgacgatgcctgtatggagtctgtgagaaacggcacctacgactaccctaagtatagcgaggagagcaagctgaatagagaggagatcgacggcgtgaaactggaaagcatgggcgtgtatcagatcctggccatctattctacagtggcctcttctctggtgctcctggtgtctctgggagccatcagcttttggatgtgtagcaatggcagcctgcagtgcagaatctgtatctgatgaacacgtgggatccagattctgctgtgccttctagttgccagccatctgttgtttgcccctcccccgtgccttccttgaccctggaaggtgccactcccactgtcctttcctaataaaatgaggaaattgcatcgcattgtctgagtaggtgtcattctattctggggggtggggtggggcaggacagcaagggggaggattgggaagacaatagcaggcatgctggggatgcggtgggctctatgggtacccaggtgctgaagaattgacccggttcctcctgggccagaaagaagcaggcacatccccttctctgtgacacaccctgtccacgcccctggttcttagttccagccccactcataggacactcatagctcaggagggctccgccttcaatcccacccgctaaagtacttggagcggtctctccctccctcatcagcccaccaaaccaaacctagcctccaagagtgggaagaaattaaagcaagataggctattaagtgcagagggagagaaaatgcctccaacatgtgaggaagtaatgagagaaatcatagaattttaaggccatgatttaaggccatcatggccttaatcttccgcttcctcgctcactgactcgctgcgctcggtcgttcggctgcggcgagcggtatcagctcactcaaaggcggtaatacggttatccacagaatcaggggataacgcaggaaagaacatgtgagcaaaaggccagcaaaaggccaggaaccgtaaaaaggccgcgttgctggcgtttttccataggctccgcccccctgacgagcatcacaaaaatcgacgctcaagtcagaggtggcgaaacccgacaggactataaagataccaggcgtttccccctggaagctccctcgtgcgctctcctgttccgaccctgccgcttaccggatacctgtccgcctttctcccttcgggaagcgtggcgctttctcatagctcacgctgtaggtatctcagttcggtgtaggtcgttcgctccaagctgggctgtgtgcacgaaccccccgttcagcccgaccgctgcgccttatccggtaactatcgtcttgagtccaacccggtaagacacgacttatcgccactggcagcagccactggtaacaggattagcagagcgaggtatgtaggcggtgctacagagttcttgaagtggtggcctaactacggctacactagaagaacagtatttggtatctgcgctctgctgaagccagttaccttcggaaaaagagttggtagctcttgatccggcaaacaaaccaccgctggtagcggtggtttttttgtttgcaagcagcagattacgcgcagaaaaaaaggatctcaagaagatcctttgatcttttctacggggtctgacgctcagtggaacgaaaactcacgttaagggattttggtcatgagattatcaaaaaggatcttcacctagatccttttaaattaaaaatgaagttttaaatcaatctaaagtatatatgagtaaacttggtctgacagttaccaatgcttaatcagtgaggcacctatctcagcgatctgtctatttcgttcatccatagttgcctgactcggggggggggggcgctgaggtctgcctcgtgaagaaggtgttgctgactcataccaggcctgaatcgccccatcatccagccagaaagtgagggagccacggttgatgagagctttgttgtaggtggaccagttggtgattttgaacttttgctttgccacggaacggtctgcgttgtcgggaagatgcgtgatctgatccttcaactcagcaaaagttcgatttattcaacaaagccgccgtcccgtcaagtcagcgtaatgctctgccagtgttacaaccaattaaccaattctgattagaaaaactcatcgagcatcaaatgaaactgcaatttattcatatcaggattatcaataccatatttttgaaaaagccgtttctgtaatgaaggagaaaactcaccgaggcagttccataggatggcaagatcctggtatcggtctgcgattccgactcgtccaacatcaatacaacctattaatttcccctcgtcaaaaataaggttatcaagtgagaaatcaccatgagtgacgactgaatccggtgagaatggcaaaagcttatgcatttctttccagacttgttcaacaggccagccattacgctcgtcatcaaaatcactcgcatcaaccaaaccgttattcattcgtgattgcgcctgagcgagacgaaatacgcgatcgctgttaaaaggacaattacaaacaggaatcgaatgcaaccggcgcaggaacactgccagcgcatcaacaatattttcacctgaatcaggatattcttctaatacctggaatgctgttttcccggggatcgcagtggtgagtaaccatgcatcatcaggagtacggataaaatgcttgatggtcggaagaggcataaattccgtcagccagtttagtctgaccatctcatctgtaacatcattggcaacgctacctttgccatgtttcagaaacaactctggcgcatcgggcttcccatacaatcgatagattgtcgcacctgattgcccgacattatcgcgagcccatttatacccatataaatcagcatccatgttggaatttaatcgcggcctcgagcaagacgtttcccgttgaatatggctcataacaccccttgtattactgtttatgtaagcagacagttttattgttcatgatgatatatttttatcttgtgcaatgtaacatcagagattttgagacacaacgtggctttccccccccccccattattgaagcatttatcagggttattgtctcatgagcggatacatatttgaatgtatttagaaaaataaacaaataggggttccgcgcacatttccccgaaaagtgccacctgacgtctaagaaaccattattatcatgacattaacctataaaaataggcgtatcacgaggccctttcgtc

SEQ ID NO: 30 - DNA, 1695 bp, Influenza A virus
  CDS (1)..(1695)
atggaagccagactgctggtgctgctgtgtgcctttgccgccacaaatgcagatacaatctgtattggctaccacgccaacaatagcaccgataccgtggatacagtgctggagaagaatgtgaccgtgacccactctgtgaatctgctggaggatagccacaatggcaagctgtgtaagctgaaaggaattgcccctctgcagctgggcaaatgtaatattgccggctggctgctgggaaatcctgaatgtgatctgctgctgacagccagcagctggtcttatatcgtggagaccagcaatagcgagaatggcacctgttaccctggcgacttcatcgattacgaggagctgagagaacagctgtctagcgtgtccagcttcgagaagttcgagatcttccctaagacaagcagctggcctaatcacacaacaaagggagtgacagccgcctgttcttatgccggagccagctccttttacagaaacctgctgtggctgacaaagaagggcagcagctaccctaacctgtctaagagctacgtgaacaacaagggcaaagaagtgctggtgctgtggggagtgcaccaccctcctacaggaacagatcagcagagcctgtaccagaatgccgatgcctatgtgtctgtgggcagcagcaagtacaacagaagattcacccctgaaattgccgccagacccaaagtgagagatcaggccggcagaatgaattactactggaccctgctggaacctggcgataccatcacatttgaggccaccggaaatctgattgccccttggtatgcctttgccctgaatagaggctctggctctggcatcattacatctgatgcccctgtgcacgactgtaataccaagtgtcagacacctcacggcgccattaatagcagcctgcccttccagaatattcaccctgtgaccatcggcgagtgtcctaagtatgtgaggagcaccaaactgagaatggccaccggcctgagaaatatccctagcatccagagcagaggactgtttggagccatcgccggctttattgagggaggatggaccggaatgatcgatggctggtacggctatcaccaccagaatgagcagggatctggatatgccgccgatcagaagtctacacagaacgccatcgacggcatcacaaacaaggtgaacagcgtgatcgagaagatgaacacccagtttacagctgtgggcaaggagttcaacaacctggagcggagaatcgagaacctgaacaagaaagtggacgacggcttcctggatatttggacctacaatgccgagctgctcgtgctcctggagaatgagagaaccctggacttccacgacagcaatgtgagaaacctgtacgagaaggtgaagagccagctgaagaacaatgccaaggagatcggcaacggctgctttgagttctaccacaagtgtgacgatgcctgtatggagtctgtgagaaacggcacctacgactaccctaagtatagcgaggagagcaagctgaatagagaggagatcgacggcgtgaaactggaaagcatgggcgtgtatcagatcctggccatctattctacagtggcctcttctctggtgctcctggtgtctctgggagccatcagcttttggatgtgtagcaatggcagcctgcagtgcagaatctgtatc

SEQ ID NO: 31 - protein, 565 aa, Influenza A virus
MEARLLVLLCAFAATNADTICIGYHANNSTDTVDTVLEKNVTVTHSVNLLEDSHNGKLCKLKGIAPLQLGKCNIAGWLLGNPECDLLLTASSWSYIVETSNSENGTCYPGDFIDYEELREQLSSVSSFEKFEIFPKTSSWPNHTTKGVTAACSYAGASSFYRNLLWLTKKGSSYPNLSKSYVNNKGKEVLVLWGVHHPPTGTDQQSLYQNADAYVSVGSSKYNRRFTPEIAARPKVRDQAGRMNYYWTLLEPGDTITFEATGNLIAPWYAFALNRGSGSGIITSDAPVHDCNTKCQTPHGAINSSLPFQNIHPVTIGECPKYVRSTKLRMATGLRNIPSIQSRGLFGAIAGFIEGGWTGMIDGWYGYHHQNEQGSGYAADQKSTQNAIDGITNKVNSVIEKMNTQFTAVGKEFNNLERRIENLNKKVDDGFLDIWTYNAELLVLLENERTLDFHDSNVRNLYEKVKSQLKNNAKEIGNGCFEFYHKCDDACMESVRNGTYDYPKYSEESKLNREEIDGVKLESMGVYQILAIYSTVASSLVLLVSLGAISFWMCSNGSLQCRICI

SEQ ID NO: 32 - DNA, 6124 bp, Influenza A virus
gacgaaagggcctcgtgatacgcctatttttataggttaatgtcatgataataatggtttcttagacgtcaggtggcacttttcggggaaatgtgcgcggaacccctatttgtttatttttctaaatacattcaaatatgtatccgctcatgagacaataaccctgataaatgcttcaataatggggggggggggaaagccacgttgtgtctcaaaatctctgatgttacattgcacaagataaaaatatatcatcatgaacaataaaactgtctgcttacataaacagtaatacaaggggtgttatgagccatattcaacgggaaacgtcttgctcgaggccgcgattaaattccaacatggatgctgatttatatgggtataaatgggctcgcgataatgtcgggcaatcaggtgcgacaatctatcgattgtatgggaagcccgatgcgccagagttgtttctgaaacatggcaaaggtagcgttgccaatgatgttacagatgagatggtcagactaaactggctgacggaatttatgcctcttccgaccatcaagcattttatccgtactcctgatgatgcatggttactcaccactgcgatccccgggaaaacagcattccaggtattagaagaatatcctgattcaggtgaaaatattgttgatgcgctggcagtgttcctgcgccggttgcattcgattcctgtttgtaattgtccttttaacagcgatcgcgtatttcgtctcgctcaggcgcaatcacgaatgaataacggtttggttgatgcgagtgattttgatgacgagcgtaatggctggcctgttgaacaagtctggaaagaaatgcataagcttttgccattctcaccggattcagtcgtcactcatggtgatttctcacttgataaccttatttttgacgaggggaaattaataggttgtattgatgttggacgagtcggaatcgcagaccgataccaggatcttgccatcctatggaactgcctcggtgagttttctccttcattacagaaacggctttttcaaaaatatggtattgataatcctgatatgaataaattgcagtttcatttgatgctcgatgagtttttctaatcagaattggttaattggttgtaacactggcagagcattacgctgacttgacgggacggcggctttgttgaataaatcgaacttttgctgagttgaaggatcagatcacgcatcttcccgacaacgcagaccgttccgtggcaaagcaaaagttcaaaatcaccaactggtccacctacaacaaagctctcatcaaccgtggctccctcactttctggctggatgatggggcgattcaggcctggtatgagtcagcaacaccttcttcacgaggcagacctcagcgccccccccccccgagtcaggcaactatggatgaacgaaatagacagatcgctgagataggtgcctcactgattaagcattggtaactgtcagaccaagtttactcatatatactttagattgatttaaaacttcatttttaatttaaaaggatctaggtgaagatcctttttgataatctcatgaccaaaatcccttaacgtgagttttcgttccactgagcgtcagaccccgtagaaaagatcaaaggatcttcttgagatcctttttttctgcgcgtaatctgctgcttgcaaacaaaaaaaccaccgctaccagcggtggtttgtttgccggatcaagagctaccaactctttttccgaaggtaactggcttcagcagagcgcagataccaaatactgttcttctagtgtagccgtagttaggccaccacttcaagaactctgtagcaccgcctacatacctcgctctgctaatcctgttaccagtggctgctgccagtggcgataagtcgtgtcttaccgggttggactcaagacgatagttaccggataaggcgcagcggtcgggctgaacggggggttcgtgcacacagcccagcttggagcgaacgacctacaccgaactgagatacctacagcgtgagctatgagaaagcgccacgcttcccgaagggagaaaggcggacaggtatccggtaagcggcagggtcggaacaggagagcgcacgagggagcttccagggggaaacgcctggtatctttatagtcctgtcgggtttcgccacctctgacttgagcgtcgatttttgtgatgctcgtcaggggggcggagcctatggaaaaacgccagcaacgcggcctttttacggttcctggccttttgctggccttttgctcacatgttctttcctgcgttatcccctgattctgtggataaccgtattaccgcctttgagtgagctgataccgctcgccgcagccgaacgaccgagcgcagcgagtcagtgagcgaggaagcggaagattaaggccatgatggccttaaatcatggccttaaaattctatgatttctctcattacttcctcacatgttggaggcattttctctccctctgcacttaatagcctatcttgctttaatttcttcccactcttggaggctaggtttggtttggtgggctgatgagggagggagagaccgctccaagtactttagcgggtgggattgaaggcggagccctcctgagctatgagtgtcctatgagtggggctggaactaagaaccaggggcgtggacagggtgtgtcacagagaaggggatgtgcctgcttctttctggcccaggaggaaccgggtcaattcttcagcacctgggtacccatagagcccaccgcatccccagcatgcctgctattgtcttcccaatcctcccccttgctgtcctgccccaccccaccccccagaatagaatgacacctactcagacaatgcgatgcaatttcctcattttattaggaaaggacagtgggagtggcaccttccagggtcaaggaaggcacgggggaggggcaaacaacagatggctggcaactagaaggcacagcagaatctggatcccacgtgttcatcagatacagattctgcactgcaggctgccattgctacacatccaaaagctgatggctcccagagacaccaggagcaccagagaagaggccactgtagaatagatggccaggatctgatacacgcccatgctttccagtttcacgccgtcgatctcctctctattcagcttgctctcctcgctatacttagggtagtcgtaggtgccgtttctcacagactccatacaggcatcgtcacacttgtggtagaactcaaagcagccgttgccgatctccttggcattgttcttcagctggctcttcaccttctcgtacaggtttctcacattgctgtcgtggaagtccagggttctctcattctccaggagcacgagcagctcggcattgtaggtccaaatatccaggaagccgtcgtccactttcttgttcaggttctcgattctccgctccaggttgttgaactccttgcccacagctgtaaactgggtgttcatcttctcgatcacgctgttcaccttgtttgtgatgccgtcgatggcgttctgtgtagacttctgatcggcggcatatccagatccctgctcattctggtggtgatagccgtaccagccatcgatcattccggtccatcctccctcaataaagccggcgatggctccaaacagtcctctgctctggatgctagggatatttctcaggccggtggccattctcagtttggtgctcctcacatacttaggacactcgccgatggtcacagggtgaatattctggaagggcaggctgctattaatggcgccgtgaggtgtctgacacttggtattacagtcgtgcacaggggcatcagatgtaatgatgccagagccagagcctctattcagggcaaaggcataccaaggggcaatcagatttccggtggcctcaaatgtgatggtatcgccaggttccagcagggtccagtagtaattcattctgccggcctgatctctcactttgggtctggcggcaatttcaggggtgaatcttctgttgtacttgctgctgcccacagacacataggcatcggcattctggtacaggctctgctgatctgttcctgtaggagggtggtgcactccccacagcaccagcacttctttgcccttgttgttcacgtagctcttagacaggttagggtagctgctgcccttctttgtcagccacagcaggtttctgtaaaaggagctggctccggcataagaacaggcggctgtcactccctttgttgtgtgattaggccagctgcttgtcttagggaagatctcgaacttctcgaagctggacacgctagacagctgttctctcagctcctcgtaatcgatgaagtcgccagggtaacaggtgccattctcgctattgctggtctccacgatataagaccagctgctggctgtcagcagcagatcacattcaggatttcccagcagccagccggcaatattacatttgcccagctgcagaggggcaattcctttcagcttacacagcttgccattgtggctatcctccagcagattcacagagtgggtcacggtcacattcttctccagcactgtatccacggtatcggtgctattgttggcgtggtagccaatacagattgtatctgcatttgtggcggcaaaggcacacagcagcaccagcagtctggcttccatggtggcgatatctctagagcggccgcgatatctgatcacacgtgtcgacgacggtgactgcagaaaagacccatggaaaggaacagtctgttagtctgtcagctattatgtctggtggcgcgcgcggcagcaacgagtactgctcagactacactgccctccaccgttaactagagttgagcaagcagggtcaggcaaagcgtggagagccggctgagtctaggtaggctccaagggagcgccggacaaaggcccggtctcgacctgagctttaaacttacctagacggcggacgcagttcaggaggcaccacaggcgggaggcggcagaacgcgactcaaccggcgtggatggcggcctcaggtagggcggcgggcgcgtgaaggagagatgcgagccgatggaggctggatcggtcccggtgtcttctatggaggtcaaaacagcgtggatggcgtctccaggcgatctgacggttcactaaacgagctctgcttatatagacctcccaccgtacacgcctaccgcccatttgcgtcaatggggcggagttgttacgacattttgggaattcccgttgattttggtgagtcaaaacaaactcccattgacgtcaatggggtggagacttggaagttcccgtgagtcaaaccgctatccacgcccattgatgtactgccaaaaccgcatcaccatggtaatagcgatgactaatacgtagatgtactgccaagtaggaaattcccataaggtcatgtactgggcataatgcaagcttatggaagttcccgtcattgacgtcaatagggggcgtacttggcatatgatacacttggaaattcccaagtgggcagtttaccgtaaatactccacccattgacgtcaatggaagttccctattggcgttactatgggaacatacgtcattattgacgtcaatgggcgggggtcgttgggcggtcagccaggtttggaaattcccgtaagttatgtaacgcggaactccatatatgggctatggaagttcccgtaattgattactattaataactagtcaataatcaatgtcaacatggcggtaatgttggacatgagccaatataaatgtacatattatgatatggatacaacgtatgcaatggccaatagccaatctgatgcggtattttctccttacgcatctgtgcggtatttcacaccgcatatggtgcactctcagtacaatctgctctgatgccgcatagttaagccagccccgacacccgccaacacccgctgacgcgccctgacgggcttgtctgctcccggcatccgcttacagacaagctgtgaccgtctccgggagctgcatgtgtcagaggttttcaccgtcatcaccgaaacgcgcga

SEQ ID NO: 33 - DNA, 6117 bp, Influenza A virus
tcgcgcgtttcggtgatgacggtgaaaacctctgacacatgcagctcccggagacggtcacagcttgtctgtaagcggatgccgggagcagacaagcccgtcagggcgcgtcagcgggtgttggcgggtgtcggggctggcttaactatgcggcatcagagcagattgtactgagagtgcaccatatgcggtgtgaaataccgcacagatgcgtaaggagaaaataccgcatcagattggctattggccattgcatacgttgtatccatatcataatatgtacatttatattggctcatgtccaacattaccgccatgttgacattgattattgactagttattaatagtaatcaattacggggtcattagttcatagcccatatatggagttccgcgttacataacttacggtaaatggcccgcctggctgaccgcccaacgacccccgcccattgacgtcaataatgacgtatgttcccatagtaacgccaatagggactttccattgacgtcaatgggtggagtatttacggtaaactgcccacttggcagtacatcaagtgtatcatatgccaagtacgccccctattgacgtcaatgacggtaaatggcccgcctggcattatgcccagtacatgaccttatgggactttcctacttggcagtacatctacgtattagtcatcgctattaccatggtgatgcggttttggcagtacatcaatgggcgtggatagcggtttgactcacggggatttccaagtctccaccccattgacgtcaatgggagtttgttttggcaccaaaatcaacgggactttccaaaatgtcgtaacaactccgccccattgacgcaaatgggcggtaggcgtgtacggtgggaggtctatataagcagagctcgtttagtgaaccgtcagatcgcctggagacgccatccacgctgttttgacctccatagaagacaccgggaccgatccagcctccatcggctcgcatctctccttcacgcgcccgccgccctacctgaggccgccatccacgccggttgagtcgcgttctgccgcctcccgcctgtggtgcctcctgaactgcgtccgccgtctaggtaagtttaaagctcaggtcgagaccgggcctttgtccggcgctcccttggagcctacctagactcagccggctctccacgctttgcctgaccctgcttgctcaactctagttaacggtggagggcagtgtagtctgagcagtactcgttgctgccgcgcgcgccaccagacataatagctgacagactaacagactgttcctttccatgggtcttttctgcagtcaccgtcgtcgacacgtgtgatcagatatcgcggccgctctagagatatcgccaccatgaaggctattttggtcgtgctcctgtacacctttgccacagccaatgccgataccctttgtattggctaccatgcaaacaactctaccgatacggtcgacacggtgctcgaaaagaatgttactgtcacccactctgtgaacttgctggaggataaacacaatggcaagctctgcaaactgcgaggggtggctcccctgcatctgggaaaatgtaatattgccggctggatactgggtaatccagaatgcgaatccttgagtacggcatccagttggtcctatatcgtcgagaccccgtcaagtgacaatgggacctgctacccaggcgacttcattgattatgaagagctgagggagcagttgtcatccgtaagcagcttcgaaaggtttgagattttcccgaaaactagctcctggcccaatcatacaaacaaaggagttactgcagcctgtcctcatgcgggcgcgaaaagcttctacaagaacctgatatggctcgtgaagaaaggcaattcatacccaaaactgtctaagagctacataaacgataaagggaaagaggttctggtgctttggggcatacaccacccatctacctcagccgaccagcagtctctgtatcagaacgccgacacatacgtgtttgtgggcagctcccgctattctaagaagttcaaacccgagatcgccatcagaccaaaggtgagagaccaggaaggaaggatgaattattactggaccttggtcgaacctggcgataagataacgtttgaggctacgggcaacctggtcgtgccgagatatgcttttgccatggagaggaatgcggggagcggaattatcatcagcgacactccagttcatgactgtaataccacatgtcagacaccgaagggcgccatcaacacgagcttgccctttcagaatatacatccaatcacaatcggaaaatgccccaagtacgtgaaaagcactaaactgagactcgccaccggactcaggaatatcccaagcatccagtcacggggtctgttcggcgctatcgccggatttattgaaggcggctggacggggatggtggacggttggtacggctaccatcatcaaaatgagcagggctccggatacgccgctgacctgaaatctacgcagaatgccatagatgagatcacaaacaaggtcaatagtgtgatagaaaaaatgaatactcagttcacagctgttggaaaggagtttaaccacctcgagaagcgaattgagaacctgaacaagaaggtggacgatggctttttggatatctggacgtataacgctgagctgcttgttctgctggagaacgaaagaacccttgactaccacgattccaacgtgaagaatctgtatgagaaagtgcgaagccagttgaaaaacaacgcaaaagaaataggcaacggctgtttcgagttctaccacaaatgcgataacacctgcatggagagtgtgaagaacggaacgtacgattatccaaaatactccgaggaggccaaactcaatagggaggagatagacggtgttaagctggagtccacacgcatctatcagattctggcgatctactctactgtggcttccagcctggtgctggtcgtttcccttggggcgatcagcttctggatgtgcagcaatggctccctgcaatgccgcatctgcatctgataggatccagatctgctgtgccttctagttgccagccatctgttgtttgcccctcccccgtgccttccttgaccctggaaggtgccactcccactgtcctttcctaataaaatgaggaaattgcatcgcattgtctgagtaggtgtcattctattctggggggtggggtggggcaggacagcaagggggaggattgggaagacaatagcaggcatgctggggatgcggtgggctctatgggtacccaggtgctgaagaattgacccggttcctcctgggccagaaagaagcaggcacatccccttctctgtgacacaccctgtccacgcccctggttcttagttccagccccactcataggacactcatagctcaggagggctccgccttcaatcccacccgctaaagtacttggagcggtctctccctccctcatcagcccaccaaaccaaacctagcctccaagagtgggaagaaattaaagcaagataggctattaagtgcagagggagagaaaatgcctccaacatgtgaggaagtaatgagagaaatcatagaattttaaggccatgatttaaggccatcatggccttaatcttccgcttcctcgctcactgactcgctgcgctcggtcgttcggctgcggcgagcggtatcagctcactcaaaggcggtaatacggttatccacagaatcaggggataacgcaggaaagaacatgtgagcaaaaggccagcaaaaggccaggaaccgtaaaaaggccgcgttgctggcgtttttccataggctccgcccccctgacgagcatcacaaaaatcgacgctcaagtcagaggtggcgaaacccgacaggactataaagataccaggcgtttccccctggaagctccctcgtgcgctctcctgttccgaccctgccgcttaccggatacctgtccgcctttctcccttcgggaagcgtggcgctttctcatagctcacgctgtaggtatctcagttcggtgtaggtcgttcgctccaagctgggctgtgtgcacgaaccccccgttcagcccgaccgctgcgccttatccggtaactatcgtcttgagtccaacccggtaagacacgacttatcgccactggcagcagccactggtaacaggattagcagagcgaggtatgtaggcggtgctacagagttcttgaagtggtggcctaactacggctacactagaagaacagtatttggtatctgcgctctgctgaagccagttaccttcggaaaaagagttggtagctcttgatccggcaaacaaaccaccgctggtagcggtggtttttttgtttgcaagcagcagattacgcgcagaaaaaaaggatctcaagaagatcctttgatcttttctacggggtctgacgctcagtggaacgaaaactcacgttaagggattttggtcatgagattatcaaaaaggatcttcacctagatccttttaaattaaaaatgaagttttaaatcaatctaaagtatatatgagtaaacttggtctgacagttaccaatgcttaatcagtgaggcacctatctcagcgatctgtctatttcgttcatccatagttgcctgactcggggggggggggcgctgaggtctgcctcgtgaagaaggtgttgctgactcataccaggcctgaatcgccccatcatccagccagaaagtgagggagccacggttgatgagagctttgttgtaggtggaccagttggtgattttgaacttttgctttgccacggaacggtctgcgttgtcgggaagatgcgtgatctgatccttcaactcagcaaaagttcgatttattcaacaaagccgccgtcccgtcaagtcagcgtaatgctctgccagtgttacaaccaattaaccaattctgattagaaaaactcatcgagcatcaaatgaaactgcaatttattcatatcaggattatcaataccatatttttgaaaaagccgtttctgtaatgaaggagaaaactcaccgaggcagttccataggatggcaagatcctggtatcggtctgcgattccgactcgtccaacatcaatacaacctattaatttcccctcgtcaaaaataaggttatcaagtgagaaatcaccatgagtgacgactgaatccggtgagaatggcaaaagcttatgcatttctttccagacttgttcaacaggccagccattacgctcgtcatcaaaatcactcgcatcaaccaaaccgttattcattcgtgattgcgcctgagcgagacgaaatacgcgatcgctgttaaaaggacaattacaaacaggaatcgaatgcaaccggcgcaggaacactgccagcgcatcaacaatattttcacctgaatcaggatattcttctaatacctggaatgctgttttcccggggatcgcagtggtgagtaaccatgcatcatcaggagtacggataaaatgcttgatggtcggaagaggcataaattccgtcagccagtttagtctgaccatctcatctgtaacatcattggcaacgctacctttgccatgtttcagaaacaactctggcgcatcgggcttcccatacaatcgatagattgtcgcacctgattgcccgacattatcgcgagcccatttatacccatataaatcagcatccatgttggaatttaatcgcggcctcgagcaagacgtttcccgttgaatatggctcataacaccccttgtattactgtttatgtaagcagacagttttattgttcatgatgatatatttttatcttgtgcaatgtaacatcagagattttgagacacaacgtggctttccccccccccccattattgaagcatttatcagggttattgtctcatgagcggatacatatttgaatgtatttagaaaaataaacaaataggggttccgcgcacatttccccgaaaagtgccacctgacgtctaagaaaccattattatcatgacattaacctataaaaataggcgtatcacgaggccctttcgtc

SEQ ID NO: 34 - DNA, 1695 bp, Influenza A virus
  CDS (1)..(1695)
atgaaggctattttggtcgtgctcctgtacacctttgccacagccaatgccgataccctttgtattggctaccatgcaaacaactctaccgatacggtcgacacggtgctcgaaaagaatgttactgtcacccactctgtgaacttgctggaggataaacacaatggcaagctctgcaaactgcgaggggtggctcccctgcatctgggaaaatgtaatattgccggctggatactgggtaatccagaatgcgaatccttgagtacggcatccagttggtcctatatcgtcgagaccccgtcaagtgacaatgggacctgctacccaggcgacttcattgattatgaagagctgagggagcagttgtcatccgtaagcagcttcgaaaggtttgagattttcccgaaaactagctcctggcccaatcatacaaacaaaggagttactgcagcctgtcctcatgcgggcgcgaaaagcttctacaagaacctgatatggctcgtgaagaaaggcaattcatacccaaaactgtctaagagctacataaacgataaagggaaagaggttctggtgctttggggcatacaccacccatctacctcagccgaccagcagtctctgtatcagaacgccgacacatacgtgtttgtgggcagctcccgctattctaagaagttcaaacccgagatcgccatcagaccaaaggtgagagaccaggaaggaaggatgaattattactggaccttggtcgaacctggcgataagataacgtttgaggctacgggcaacctggtcgtgccgagatatgcttttgccatggagaggaatgcggggagcggaattatcatcagcgacactccagttcatgactgtaataccacatgtcagacaccgaagggcgccatcaacacgagcttgccctttcagaatatacatccaatcacaatcggaaaatgccccaagtacgtgaaaagcactaaactgagactcgccaccggactcaggaatatcccaagcatccagtcacggggtctgttcggcgctatcgccggatttattgaaggcggctggacggggatggtggacggttggtacggctaccatcatcaaaatgagcagggctccggatacgccgctgacctgaaatctacgcagaatgccatagatgagatcacaaacaaggtcaatagtgtgatagaaaaaatgaatactcagttcacagctgttggaaaggagtttaaccacctcgagaagcgaattgagaacctgaacaagaaggtggacgatggctttttggatatctggacgtataacgctgagctgcttgttctgctggagaacgaaagaacccttgactaccacgattccaacgtgaagaatctgtatgagaaagtgcgaagccagttgaaaaacaacgcaaaagaaataggcaacggctgtttcgagttctaccacaaatgcgataacacctgcatggagagtgtgaagaacggaacgtacgattatccaaaatactccgaggaggccaaactcaatagggaggagatagacggtgttaagctggagtccacacgcatctatcagattctggcgatctactctactgtggcttccagcctggtgctggtcgtttcccttggggcgatcagcttctggatgtgcagcaatggctccctgcaatgccgcatctgcatc

SEQ ID NO: 35 - protein, 565 aa, Influenza A virus
MKAILVVLLYTFATANADTLCIGYHANNSTDTVDTVLEKNVTVTHSVNLLEDKHNGKLCKLRGVAPLHLGKCNIAGWILGNPECESLSTASSWSYIVETPSSDNGTCYPGDFIDYEELREQLSSVSSFERFEIFPKTSSWPNHTNKGVTAACPHAGAKSFYKNLIWLVKKGNSYPKLSKSYINDKGKEVLVLWGIHHPSTSADQQSLYQNADTYVFVGSSRYSKKFKPEIAIRPKVRDQEGRMNYYWTLVEPGDKITFEATGNLVVPRYAFAMERNAGSGIIISDTPVHDCNTTCQTPKGAINTSLPFQNIHPITIGKCPKYVKSTKLRLATGLRNIPSIQSRGLFGAIAGFIEGGWTGMVDGWYGYHHQNEQGSGYAADLKSTQNAIDEITNKVNSVIEKMNTQFTAVGKEFNHLEKRIENLNKKVDDGFLDIWTYNAELLVLLENERTLDYHDSNVKNLYEKVRSQLKNNAKEIGNGCFEFYHKCDNTCMESVKNGTYDYPKYSEEAKLNREEIDGVKLESTRIYQILAIYSTVASSLVLVVSLGAISFWMCSNGSLQCRICI

SEQ ID NO: 36 - DNA, 6117 bp, Influenza A virus
gacgaaagggcctcgtgatacgcctatttttataggttaatgtcatgataataatggtttcttagacgtcaggtggcacttttcggggaaatgtgcgcggaacccctatttgtttatttttctaaatacattcaaatatgtatccgctcatgagacaataaccctgataaatgcttcaataatggggggggggggaaagccacgttgtgtctcaaaatctctgatgttacattgcacaagataaaaatatatcatcatgaacaataaaactgtctgcttacataaacagtaatacaaggggtgttatgagccatattcaacgggaaacgtcttgctcgaggccgcgattaaattccaacatggatgctgatttatatgggtataaatgggctcgcgataatgtcgggcaatcaggtgcgacaatctatcgattgtatgggaagcccgatgcgccagagttgtttctgaaacatggcaaaggtagcgttgccaatgatgttacagatgagatggtcagactaaactggctgacggaatttatgcctcttccgaccatcaagcattttatccgtactcctgatgatgcatggttactcaccactgcgatccccgggaaaacagcattccaggtattagaagaatatcctgattcaggtgaaaatattgttgatgcgctggcagtgttcctgcgccggttgcattcgattcctgtttgtaattgtccttttaacagcgatcgcgtatttcgtctcgctcaggcgcaatcacgaatgaataacggtttggttgatgcgagtgattttgatgacgagcgtaatggctggcctgttgaacaagtctggaaagaaatgcataagcttttgccattctcaccggattcagtcgtcactcatggtgatttctcacttgataaccttatttttgacgaggggaaattaataggttgtattgatgttggacgagtcggaatcgcagaccgataccaggatcttgccatcctatggaactgcctcggtgagttttctccttcattacagaaacggctttttcaaaaatatggtattgataatcctgatatgaataaattgcagtttcatttgatgctcgatgagtttttctaatcagaattggttaattggttgtaacactggcagagcattacgctgacttgacgggacggcggctttgttgaataaatcgaacttttgctgagttgaaggatcagatcacgcatcttcccgacaacgcagaccgttccgtggcaaagcaaaagttcaaaatcaccaactggtccacctacaacaaagctctcatcaaccgtggctccctcactttctggctggatgatggggcgattcaggcctggtatgagtcagcaacaccttcttcacgaggcagacctcagcgccccccccccccgagtcaggcaactatggatgaacgaaatagacagatcgctgagataggtgcctcactgattaagcattggtaactgtcagaccaagtttactcatatatactttagattgatttaaaacttcatttttaatttaaaaggatctaggtgaagatcctttttgataatctcatgaccaaaatcccttaacgtgagttttcgttccactgagcgtcagaccccgtagaaaagatcaaaggatcttcttgagatcctttttttctgcgcgtaatctgctgcttgcaaacaaaaaaaccaccgctaccagcggtggtttgtttgccggatcaagagctaccaactctttttccgaaggtaactggcttcagcagagcgcagataccaaatactgttcttctagtgtagccgtagttaggccaccacttcaagaactctgtagcaccgcctacatacctcgctctgctaatcctgttaccagtggctgctgccagtggcgataagtcgtgtcttaccgggttggactcaagacgatagttaccggataaggcgcagcggtcgggctgaacggggggttcgtgcacacagcccagcttggagcgaacgacctacaccgaactgagatacctacagcgtgagctatgagaaagcgccacgcttcccgaagggagaaaggcggacaggtatccggtaagcggcagggtcggaacaggagagcgcacgagggagcttccagggggaaacgcctggtatctttatagtcctgtcgggtttcgccacctctgacttgagcgtcgatttttgtgatgctcgtcaggggggcggagcctatggaaaaacgccagcaacgcggcctttttacggttcctggccttttgctggccttttgctcacatgttctttcctgcgttatcccctgattctgtggataaccgtattaccgcctttgagtgagctgataccgctcgccgcagccgaacgaccgagcgcagcgagtcagtgagcgaggaagcggaagattaaggccatgatggccttaaatcatggccttaaaattctatgatttctctcattacttcctcacatgttggaggcattttctctccctctgcacttaatagcctatcttgctttaatttcttcccactcttggaggctaggtttggtttggtgggctgatgagggagggagagaccgctccaagtactttagcgggtgggattgaaggcggagccctcctgagctatgagtgtcctatgagtggggctggaactaagaaccaggggcgtggacagggtgtgtcacagagaaggggatgtgcctgcttctttctggcccaggaggaaccgggtcaattcttcagcacctgggtacccatagagcccaccgcatccccagcatgcctgctattgtcttcccaatcctcccccttgctgtcctgccccaccccaccccccagaatagaatgacacctactcagacaatgcgatgcaatttcctcattttattaggaaaggacagtgggagtggcaccttccagggtcaaggaaggcacgggggaggggcaaacaacagatggctggcaactagaaggcacagcagatctggatcctatcagatgcagatgcggcattgcagggagccattgctgcacatccagaagctgatcgccccaagggaaacgaccagcaccaggctggaagccacagtagagtagatcgccagaatctgatagatgcgtgtggactccagcttaacaccgtctatctcctccctattgagtttggcctcctcggagtattttggataatcgtacgttccgttcttcacactctccatgcaggtgttatcgcatttgtggtagaactcgaaacagccgttgcctatttcttttgcgttgtttttcaactggcttcgcactttctcatacagattcttcacgttggaatcgtggtagtcaagggttctttcgttctccagcagaacaagcagctcagcgttatacgtccagatatccaaaaagccatcgtccaccttcttgttcaggttctcaattcgcttctcgaggtggttaaactcctttccaacagctgtgaactgagtattcattttttctatcacactattgaccttgtttgtgatctcatctatggcattctgcgtagatttcaggtcagcggcgtatccggagccctgctcattttgatgatggtagccgtaccaaccgtccaccatccccgtccagccgccttcaataaatccggcgatagcgccgaacagaccccgtgactggatgcttgggatattcctgagtccggtggcgagtctcagtttagtgcttttcacgtacttggggcattttccgattgtgattggatgtatattctgaaagggcaagctcgtgttgatggcgcccttcggtgtctgacatgtggtattacagtcatgaactggagtgtcgctgatgataattccgctccccgcattcctctccatggcaaaagcatatctcggcacgaccaggttgcccgtagcctcaaacgttatcttatcgccaggttcgaccaaggtccagtaataattcatccttccttcctggtctctcacctttggtctgatggcgatctcgggtttgaacttcttagaatagcgggagctgcccacaaacacgtatgtgtcggcgttctgatacagagactgctggtcggctgaggtagatgggtggtgtatgccccaaagcaccagaacctctttccctttatcgtttatgtagctcttagacagttttgggtatgaattgcctttcttcacgagccatatcaggttcttgtagaagcttttcgcgcccgcatgaggacaggctgcagtaactcctttgtttgtatgattgggccaggagctagttttcgggaaaatctcaaacctttcgaagctgcttacggatgacaactgctccctcagctcttcataatcaatgaagtcgcctgggtagcaggtcccattgtcacttgacggggtctcgacgatataggaccaactggatgccgtactcaaggattcgcattctggattacccagtatccagccggcaatattacattttcccagatgcaggggagccacccctcgcagtttgcagagcttgccattgtgtttatcctccagcaagttcacagagtgggtgacagtaacattcttttcgagcaccgtgtcgaccgtatcggtagagttgtttgcatggtagccaatacaaagggtatcggcattggctgtggcaaaggtgtacaggagcacgaccaaaatagccttcatggtggcgatatctctagagcggccgcgatatctgatcacacgtgtcgacgacggtgactgcagaaaagacccatggaaaggaacagtctgttagtctgtcagctattatgtctggtggcgcgcgcggcagcaacgagtactgctcagactacactgccctccaccgttaactagagttgagcaagcagggtcaggcaaagcgtggagagccggctgagtctaggtaggctccaagggagcgccggacaaaggcccggtctcgacctgagctttaaacttacctagacggcggacgcagttcaggaggcaccacaggcgggaggcggcagaacgcgactcaaccggcgtggatggcggcctcaggtagggcggcgggcgcgtgaaggagagatgcgagccgatggaggctggatcggtcccggtgtcttctatggaggtcaaaacagcgtggatggcgtctccaggcgatctgacggttcactaaacgagctctgcttatatagacctcccaccgtacacgcctaccgcccatttgcgtcaatggggcggagttgttacgacattttggaaagtcccgttgattttggtgccaaaacaaactcccattgacgtcaatggggtggagacttggaaatccccgtgagtcaaaccgctatccacgcccattgatgtactgccaaaaccgcatcaccatggtaatagcgatgactaatacgtagatgtactgccaagtaggaaagtcccataaggtcatgtactgggcataatgccaggcgggccatttaccgtcattgacgtcaatagggggcgtacttggcatatgatacacttgatgtactgccaagtgggcagtttaccgtaaatactccacccattgacgtcaatggaaagtccctattggcgttactatgggaacatacgtcattattgacgtcaatgggcgggggtcgttgggcggtcagccaggcgggccatttaccgtaagttatgtaacgcggaactccatatatgggctatgaactaatgaccccgtaattgattactattaataactagtcaataatcaatgtcaacatggcggtaatgttggacatgagccaatataaatgtacatattatgatatggatacaacgtatgcaatggccaatagccaatctgatgcggtattttctccttacgcatctgtgcggtatttcacaccgcatatggtgcactctcagtacaatctgctctgatgccgcatagttaagccagccccgacacccgccaacacccgctgacgcgccctgacgggcttgtctgctcccggcatccgcttacagacaagctgtgaccgtctccgggagctgcatgtgtcagaggttttcaccgtcatcaccgaaacgcgcga

SEQ ID NO: 37 - DNA, 6120 bp, Influenza A virus
tcgcgcgtttcggtgatgacggtgaaaacctctgacacatgcagctcccggagacggtcacagcttgtctgtaagcggatgccgggagcagacaagcccgtcagggcgcgtcagcgggtgttggcgggtgtcggggctggcttaactatgcggcatcagagcagattgtactgagagtgcaccatatgcggtgtgaaataccgcacagatgcgtaaggagaaaataccgcatcagattggctattggccattgcatacgttgtatccatatcataatatgtacatttatattggctcatgtccaacattaccgccatgttgacattgattattgactagttattaatagtaatcaattacggggtcattagttcatagcccatatatggagttccgcgttacataacttacggtaaatggcccgcctggctgaccgcccaacgacccccgcccattgacgtcaataatgacgtatgttcccatagtaacgccaatagggactttccattgacgtcaatgggtggagtatttacggtaaactgcccacttggcagtacatcaagtgtatcatatgccaagtacgccccctattgacgtcaatgacggtaaatggcccgcctggcattatgcccagtacatgaccttatgggactttcctacttggcagtacatctacgtattagtcatcgctattaccatggtgatgcggttttggcagtacatcaatgggcgtggatagcggtttgactcacggggatttccaagtctccaccccattgacgtcaatgggagtttgttttggcaccaaaatcaacgggactttccaaaatgtcgtaacaactccgccccattgacgcaaatgggcggtaggcgtgtacggtgggaggtctatataagcagagctcgtttagtgaaccgtcagatcgcctggagacgccatccacgctgttttgacctccatagaagacaccgggaccgatccagcctccatcggctcgcatctctccttcacgcgcccgccgccctacctgaggccgccatccacgccggttgagtcgcgttctgccgcctcccgcctgtggtgcctcctgaactgcgtccgccgtctaggtaagtttaaagctcaggtcgagaccgggcctttgtccggcgctcccttggagcctacctagactcagccggctctccacgctttgcctgaccctgcttgctcaactctagttaacggtggagggcagtgtagtctgagcagtactcgttgctgccgcgcgcgccaccagacataatagctgacagactaacagactgttcctttccatgggtcttttctgcagtcaccgtcgtcgacacgtgtgatcagatatcgcggccgctctagagatatcgccaccatgaaggctattttggtcgtgctcctgtacacctttgccacagccaatgccgataccctttgtattggctaccatgcaaacaactctaccgatacggtcgacacggtgctcgaaaagaatgttactgtcacccactctgtgaacttgctggaggataaacacaatggcaagctctgcaaactgcgaggggtggctcccctgcatctgggaaaatgtaatattgccggctggatactgggtaatccagaatgcgaatccttgagtacggcatccagttggtcctatatcgtcgagaccccgtcaagtgacaatgggacctgctacccaggcgacttcattgattatgaagagctgagggagcagttgtcatccgtaagcagcttcgaaaggtttgagattttcccgaaaactagctcctggcccaatcatgactctaacaaaggagttactgcagcctgtcctcatgcgggcgcgaaaagcttctacaagaacctgatatggctcgtgaagaaaggcaattcatacccaaacctgtctaagagctacataaacgataaagggaaagaggttctggtgctttggggcatacaccacccatctacctcagccgaccagcagtctctgtatcagaacgccgacacatacgtgtttgtgggcagctcccgctattctaagaagttcaaacccgagatcgccatcagaccaaaggtgagagaccaggaaggaaggatgaattattactggaccttggtcgaacctggcgataagataacgtttgaggctacgggcaacctggtcgtgccgagatatgcttttgccatggagaggaatgcggggagcggaattatcatcagcgacactccagttcatgactgtaataccacatgtcagacaccgaagggcgccatcaacacgagcttgccctttcagaatatacatccaatcacaatcggaaaatgccccaagtacgtgaaaagcactaaactgagactcgccaccggactcaggaatatcccaagcatccagtcacggggtctgttcggcgctatcgccggatttattgaaggcggctggacggggatggtggacggttggtacggctaccatcatcaaaatgagcagggctccggatacgccgctgacctgaaatctacgcagaatgccatagatgagatcacaaacaaggtcaatagtgtgatagaaaaaatgaatactcagttcacagctgttggaaaggagtttaaccacctcgagaagcgaattgagaacctgaacaagaaggtggacgatggctttttggatatctggacgtataacgctgagctgcttgttctgctggagaacgaaagaacccttgactaccacgattccaacgtgaagaatctgtatgagaaagtgcgaagccagttgaaaaacaacgcaaaagaaataggcaacggctgtttcgagttctaccacaaatgcgataacacctgcatggagagtgtgaagaacggaacgtacgattatccaaaatactccgaggaggccaaactcaatagggaggagatagacggtgttaagctggagtccacacgcatctatcagattctggcgatctactctactgtggcttccagcctggtgctggtcgtttcccttggggcgatcagcttctggatgtgcagcaatggctccctgcaatgccgcatctgcatctgataggatccagatctgctgtgccttctagttgccagccatctgttgtttgcccctcccccgtgccttccttgaccctggaaggtgccactcccactgtcctttcctaataaaatgaggaaattgcatcgcattgtctgagtaggtgtcattctattctggggggtggggtggggcaggacagcaagggggaggattgggaagacaatagcaggcatgctggggatgcggtgggctctatgggtacccaggtgctgaagaattgacccggttcctcctgggccagaaagaagcaggcacatccccttctctgtgacacaccctgtccacgcccctggttcttagttccagccccactcataggacactcatagctcaggagggctccgccttcaatcccacccgctaaagtacttggagcggtctctccctccctcatcagcccaccaaaccaaacctagcctccaagagtgggaagaaattaaagcaagataggctattaagtgcagagggagagaaaatgcctccaacatgtgaggaagtaatgagagaaatcatagaattttaaggccatgatttaaggccatcatggccttaatcttccgcttcctcgctcactgactcgctgcgctcggtcgttcggctgcggcgagcggtatcagctcactcaaaggcggtaatacggttatccacagaatcaggggataacgcaggaaagaacatgtgagcaaaaggccagcaaaaggccaggaaccgtaaaaaggccgcgttgctggcgtttttccataggctccgcccccctgacgagcatcacaaaaatcgacgctcaagtcagaggtggcgaaacccgacaggactataaagataccaggcgtttccccctggaagctccctcgtgcgctctcctgttccgaccctgccgcttaccggatacctgtccgcctttctcccttcgggaagcgtggcgctttctcatagctcacgctgtaggtatctcagttcggtgtaggtcgttcgctccaagctgggctgtgtgcacgaaccccccgttcagcccgaccgctgcgccttatccggtaactatcgtcttgagtccaacccggtaagacacgacttatcgccactggcagcagccactggtaacaggattagcagagcgaggtatgtaggcggtgctacagagttcttgaagtggtggcctaactacggctacactagaagaacagtatttggtatctgcgctctgctgaagccagttaccttcggaaaaagagttggtagctcttgatccggcaaacaaaccaccgctggtagcggtggtttttttgtttgcaagcagcagattacgcgcagaaaaaaaggatctcaagaagatcctttgatcttttctacggggtctgacgctcagtggaacgaaaactcacgttaagggattttggtcatgagattatcaaaaaggatcttcacctagatccttttaaattaaaaatgaagttttaaatcaatctaaagtatatatgagtaaacttggtctgacagttaccaatgcttaatcagtgaggcacctatctcagcgatctgtctatttcgttcatccatagttgcctgactcggggggggggggcgctgaggtctgcctcgtgaagaaggtgttgctgactcataccaggcctgaatcgccccatcatccagccagaaagtgagggagccacggttgatgagagctttgttgtaggtggaccagttggtgattttgaacttttgctttgccacggaacggtctgcgttgtcgggaagatgcgtgatctgatccttcaactcagcaaaagttcgatttattcaacaaagccgccgtcccgtcaagtcagcgtaatgctctgccagtgttacaaccaattaaccaattctgattagaaaaactcatcgagcatcaaatgaaactgcaatttattcatatcaggattatcaataccatatttttgaaaaagccgtttctgtaatgaaggagaaaactcaccgaggcagttccataggatggcaagatcctggtatcggtctgcgattccgactcgtccaacatcaatacaacctattaatttcccctcgtcaaaaataaggttatcaagtgagaaatcaccatgagtgacgactgaatccggtgagaatggcaaaagcttatgcatttctttccagacttgttcaacaggccagccattacgctcgtcatcaaaatcactcgcatcaaccaaaccgttattcattcgtgattgcgcctgagcgagacgaaatacgcgatcgctgttaaaaggacaattacaaacaggaatcgaatgcaaccggcgcaggaacactgccagcgcatcaacaatattttcacctgaatcaggatattcttctaatacctggaatgctgttttcccggggatcgcagtggtgagtaaccatgcatcatcaggagtacggataaaatgcttgatggtcggaagaggcataaattccgtcagccagtttagtctgaccatctcatctgtaacatcattggcaacgctacctttgccatgtttcagaaacaactctggcgcatcgggcttcccatacaatcgatagattgtcgcacctgattgcccgacattatcgcgagcccatttatacccatataaatcagcatccatgttggaatttaatcgcggcctcgagcaagacgtttcccgttgaatatggctcataacaccccttgtattactgtttatgtaagcagacagttttattgttcatgatgatatatttttatcttgtgcaatgtaacatcagagattttgagacacaacgtggctttccccccccccccattattgaagcatttatcagggttattgtctcatgagcggatacatatttgaatgtatttagaaaaataaacaaataggggttccgcgcacatttccccgaaaagtgccacctgacgtctaagaaaccattattatcatgacattaacctataaaaataggcgtatcacgaggccctttcgtc

SEQ ID NO: 38 - DNA, 1698 bp, Influenza A virus
  CDS (1)..(1698)
atgaaggctattttggtcgtgctcctgtacacctttgccacagccaatgccgataccctttgtattggctaccatgcaaacaactctaccgatacggtcgacacggtgctcgaaaagaatgttactgtcacccactctgtgaacttgctggaggataaacacaatggcaagctctgcaaactgcgaggggtggctcccctgcatctgggaaaatgtaatattgccggctggatactgggtaatccagaatgcgaatccttgagtacggcatccagttggtcctatatcgtcgagaccccgtcaagtgacaatgggacctgctacccaggcgacttcattgattatgaagagctgagggagcagttgtcatccgtaagcagcttcgaaaggtttgagattttcccgaaaactagctcctggcccaatcatgactctaacaaaggagttactgcagcctgtcctcatgcgggcgcgaaaagcttctacaagaacctgatatggctcgtgaagaaaggcaattcatacccaaacctgtctaagagctacataaacgataaagggaaagaggttctggtgctttggggcatacaccacccatctacctcagccgaccagcagtctctgtatcagaacgccgacacatacgtgtttgtgggcagctcccgctattctaagaagttcaaacccgagatcgccatcagaccaaaggtgagagaccaggaaggaaggatgaattattactggaccttggtcgaacctggcgataagataacgtttgaggctacgggcaacctggtcgtgccgagatatgcttttgccatggagaggaatgcggggagcggaattatcatcagcgacactccagttcatgactgtaataccacatgtcagacaccgaagggcgccatcaacacgagcttgccctttcagaatatacatccaatcacaatcggaaaatgccccaagtacgtgaaaagcactaaactgagactcgccaccggactcaggaatatcccaagcatccagtcacggggtctgttcggcgctatcgccggatttattgaaggcggctggacggggatggtggacggttggtacggctaccatcatcaaaatgagcagggctccggatacgccgctgacctgaaatctacgcagaatgccatagatgagatcacaaacaaggtcaatagtgtgatagaaaaaatgaatactcagttcacagctgttggaaaggagtttaaccacctcgagaagcgaattgagaacctgaacaagaaggtggacgatggctttttggatatctggacgtataacgctgagctgcttgttctgctggagaacgaaagaacccttgactaccacgattccaacgtgaagaatctgtatgagaaagtgcgaagccagttgaaaaacaacgcaaaagaaataggcaacggctgtttcgagttctaccacaaatgcgataacacctgcatggagagtgtgaagaacggaacgtacgattatccaaaatactccgaggaggccaaactcaatagggaggagatagacggtgttaagctggagtccacacgcatctatcagattctggcgatctactctactgtggcttccagcctggtgctggtcgtttcccttggggcgatcagcttctggatgtgcagcaatggctccctgcaatgccgcatctgcatc

SEQ ID NO: 39 - protein, 566 aa, Influenza A virus
MKAILVVLLYTFATANADTLCIGYHANNSTDTVDTVLEKNVTVTHSVNLLEDKHNGKLCKLRGVAPLHLGKCNIAGWILGNPECESLSTASSWSYIVETPSSDNGTCYPGDFIDYEELREQLSSVSSFERFEIFPKTSSWPNHDSNKGVTAACPHAGAKSFYKNLIWLVKKGNSYPNLSKSYINDKGKEVLVLWGIHHPSTSADQQSLYQNADTYVFVGSSRYSKKFKPEIAIRPKVRDQEGRMNYYWTLVEPGDKITFEATGNLVVPRYAFAMERNAGSGIIISDTPVHDCNTTCQTPKGAINTSLPFQNIHPITIGKCPKYVKSTKLRLATGLRNIPSIQSRGLFGAIAGFIEGGWTGMVDGWYGYHHQNEQGSGYAADLKSTQNAIDEITNKVNSVIEKMNTQFTAVGKEFNHLEKRIENLNKKVDDGFLDIWTYNAELLVLLENERTLDYHDSNVKNLYEKVRSQLKNNAKEIGNGCFEFYHKCDNTCMESVKNGTYDYPKYSEEAKLNREEIDGVKLESTRIYQILAIYSTVASSLVLVVSLGAISFWMCSNGSLQCRICI

SEQ ID NO: 40 - DNA, 6120 bp, Influenza A virus
gacgaaagggcctcgtgatacgcctatttttataggttaatgtcatgataataatggtttcttagacgtcaggtggcacttttcggggaaatgtgcgcggaacccctatttgtttatttttctaaatacattcaaatatgtatccgctcatgagacaataaccctgataaatgcttcaataatggggggggggggaaagccacgttgtgtctcaaaatctctgatgttacattgcacaagataaaaatatatcatcatgaacaataaaactgtctgcttacataaacagtaatacaaggggtgttatgagccatattcaacgggaaacgtcttgctcgaggccgcgattaaattccaacatggatgctgatttatatgggtataaatgggctcgcgataatgtcgggcaatcaggtgcgacaatctatcgattgtatgggaagcccgatgcgccagagttgtttctgaaacatggcaaaggtagcgttgccaatgatgttacagatgagatggtcagactaaactggctgacggaatttatgcctcttccgaccatcaagcattttatccgtactcctgatgatgcatggttactcaccactgcgatccccgggaaaacagcattccaggtattagaagaatatcctgattcaggtgaaaatattgttgatgcgctggcagtgttcctgcgccggttgcattcgattcctgtttgtaattgtccttttaacagcgatcgcgtatttcgtctcgctcaggcgcaatcacgaatgaataacggtttggttgatgcgagtgattttgatgacgagcgtaatggctggcctgttgaacaagtctggaaagaaatgcataagcttttgccattctcaccggattcagtcgtcactcatggtgatttctcacttgataaccttatttttgacgaggggaaattaataggttgtattgatgttggacgagtcggaatcgcagaccgataccaggatcttgccatcctatggaactgcctcggtgagttttctccttcattacagaaacggctttttcaaaaatatggtattgataatcctgatatgaataaattgcagtttcatttgatgctcgatgagtttttctaatcagaattggttaattggttgtaacactggcagagcattacgctgacttgacgggacggcggctttgttgaataaatcgaacttttgctgagttgaaggatcagatcacgcatcttcccgacaacgcagaccgttccgtggcaaagcaaaagttcaaaatcaccaactggtccacctacaacaaagctctcatcaaccgtggctccctcactttctggctggatgatggggcgattcaggcctggtatgagtcagcaacaccttcttcacgaggcagacctcagcgccccccccccccgagtcaggcaactatggatgaacgaaatagacagatcgctgagataggtgcctcactgattaagcattggtaactgtcagaccaagtttactcatatatactttagattgatttaaaacttcatttttaatttaaaaggatctaggtgaagatcctttttgataatctcatgaccaaaatcccttaacgtgagttttcgttccactgagcgtcagaccccgtagaaaagatcaaaggatcttcttgagatcctttttttctgcgcgtaatctgctgcttgcaaacaaaaaaaccaccgctaccagcggtggtttgtttgccggatcaagagctaccaactctttttccgaaggtaactggcttcagcagagcgcagataccaaatactgttcttctagtgtagccgtagttaggccaccacttcaagaactctgtagcaccgcctacatacctcgctctgctaatcctgttaccagtggctgctgccagtggcgataagtcgtgtcttaccgggttggactcaagacgatagttaccggataaggcgcagcggtcgggctgaacggggggttcgtgcacacagcccagcttggagcgaacgacctacaccgaactgagatacctacagcgtgagctatgagaaagcgccacgcttcccgaagggagaaaggcggacaggtatccggtaagcggcagggtcggaacaggagagcgcacgagggagcttccagggggaaacgcctggtatctttatagtcctgtcgggtttcgccacctctgacttgagcgtcgatttttgtgatgctcgtcaggggggcggagcctatggaaaaacgccagcaacgcggcctttttacggttcctggccttttgctggccttttgctcacatgttctttcctgcgttatcccctgattctgtggataaccgtattaccgcctttgagtgagctgataccgctcgccgcagccgaacgaccgagcgcagcgagtcagtgagcgaggaagcggaagattaaggccatgatggccttaaatcatggccttaaaattctatgatttctctcattacttcctcacatgttggaggcattttctctccctctgcacttaatagcctatcttgctttaatttcttcccactcttggaggctaggtttggtttggtgggctgatgagggagggagagaccgctccaagtactttagcgggtgggattgaaggcggagccctcctgagctatgagtgtcctatgagtggggctggaactaagaaccaggggcgtggacagggtgtgtcacagagaaggggatgtgcctgcttctttctggcccaggaggaaccgggtcaattcttcagcacctgggtacccatagagcccaccgcatccccagcatgcctgctattgtcttcccaatcctcccccttgctgtcctgccccaccccaccccccagaatagaatgacacctactcagacaatgcgatgcaatttcctcattttattaggaaaggacagtgggagtggcaccttccagggtcaaggaaggcacgggggaggggcaaacaacagatggctggcaactagaaggcacagcagatctggatcctatcagatgcagatgcggcattgcagggagccattgctgcacatccagaagctgatcgccccaagggaaacgaccagcaccaggctggaagccacagtagagtagatcgccagaatctgatagatgcgtgtggactccagcttaacaccgtctatctcctccctattgagtttggcctcctcggagtattttggataatcgtacgttccgttcttcacactctccatgcaggtgttatcgcatttgtggtagaactcgaaacagccgttgcctatttcttttgcgttgtttttcaactggcttcgcactttctcatacagattcttcacgttggaatcgtggtagtcaagggttctttcgttctccagcagaacaagcagctcagcgttatacgtccagatatccaaaaagccatcgtccaccttcttgttcaggttctcaattcgcttctcgaggtggttaaactcctttccaacagctgtgaactgagtattcattttttctatcacactattgaccttgtttgtgatctcatctatggcattctgcgtagatttcaggtcagcggcgtatccggagccctgctcattttgatgatggtagccgtaccaaccgtccaccatccccgtccagccgccttcaataaatccggcgatagcgccgaacagaccccgtgactggatgcttgggatattcctgagtccggtggcgagtctcagtttagtgcttttcacgtacttggggcattttccgattgtgattggatgtatattctgaaagggcaagctcgtgttgatggcgcccttcggtgtctgacatgtggtattacagtcatgaactggagtgtcgctgatgataattccgctccccgcattcctctccatggcaaaagcatatctcggcacgaccaggttgcccgtagcctcaaacgttatcttatcgccaggttcgaccaaggtccagtaataattcatccttccttcctggtctctcacctttggtctgatggcgatctcgggtttgaacttcttagaatagcgggagctgcccacaaacacgtatgtgtcggcgttctgatacagagactgctggtcggctgaggtagatgggtggtgtatgccccaaagcaccagaacctctttccctttatcgtttatgtagctcttagacaggtttgggtatgaattgcctttcttcacgagccatatcaggttcttgtagaagcttttcgcgcccgcatgaggacaggctgcagtaactcctttgttagagtcatgattgggccaggagctagttttcgggaaaatctcaaacctttcgaagctgcttacggatgacaactgctccctcagctcttcataatcaatgaagtcgcctgggtagcaggtcccattgtcacttgacggggtctcgacgatataggaccaactggatgccgtactcaaggattcgcattctggattacccagtatccagccggcaatattacattttcccagatgcaggggagccacccctcgcagtttgcagagcttgccattgtgtttatcctccagcaagttcacagagtgggtgacagtaacattcttttcgagcaccgtgtcgaccgtatcggtagagttgtttgcatggtagccaatacaaagggtatcggcattggctgtggcaaaggtgtacaggagcacgaccaaaatagccttcatggtggcgatatctctagagcggccgcgatatctgatcacacgtgtcgacgacggtgactgcagaaaagacccatggaaaggaacagtctgttagtctgtcagctattatgtctggtggcgcgcgcggcagcaacgagtactgctcagactacactgccctccaccgttaactagagttgagcaagcagggtcaggcaaagcgtggagagccggctgagtctaggtaggctccaagggagcgccggacaaaggcccggtctcgacctgagctttaaacttacctagacggcggacgcagttcaggaggcaccacaggcgggaggcggcagaacgcgactcaaccggcgtggatggcggcctcaggtagggcggcgggcgcgtgaaggagagatgcgagccgatggaggctggatcggtcccggtgtcttctatggaggtcaaaacagcgtggatggcgtctccaggcgatctgacggttcactaaacgagctctgcttatatagacctcccaccgtacacgcctaccgcccatttgcgtcaatggggcggagttgttacgacattttggaaagtcccgttgattttggtgccaaaacaaactcccattgacgtcaatggggtggagacttggaaatccccgtgagtcaaaccgctatccacgcccattgatgtactgccaaaaccgcatcaccatggtaatagcgatgactaatacgtagatgtactgccaagtaggaaagtcccataaggtcatgtactgggcataatgccaggcgggccatttaccgtcattgacgtcaatagggggcgtacttggcatatgatacacttgatgtactgccaagtgggcagtttaccgtaaatactccacccattgacgtcaatggaaagtccctattggcgttactatgggaacatacgtcattattgacgtcaatgggcgggggtcgttgggcggtcagccaggcgggccatttaccgtaagttatgtaacgcggaactccatatatgggctatgaactaatgaccccgtaattgattactattaataactagtcaataatcaatgtcaacatggcggtaatgttggacatgagccaatataaatgtacatattatgatatggatacaacgtatgcaatggccaatagccaatctgatgcggtattttctccttacgcatctgtgcggtatttcacaccgcatatggtgcactctcagtacaatctgctctgatgccgcatagttaagccagccccgacacccgccaacacccgctgacgcgccctgacgggcttgtctgctcccggcatccgcttacagacaagctgtgaccgtctccgggagctgcatgtgtcagaggttttcaccgtcatcaccgaaacgcgcga

SEQ ID NO: 41 - DNA, 6124 bp, Influenza A virus
tcgcgcgtttcggtgatgacggtgaaaacctctgacacatgcagctcccggagacggtcacagcttgtctgtaagcggatgccgggagcagacaagcccgtcagggcgcgtcagcgggtgttggcgggtgtcggggctggcttaactatgcggcatcagagcagattgtactgagagtgcaccatatgcggtgtgaaataccgcacagatgcgtaaggagaaaataccgcatcagattggctattggccattgcatacgttgtatccatatcataatatgtacatttatattggctcatgtccaacattaccgccatgttgacattgattattgactagttattaatagtaatcaattacgggaacttccatagcccatatatggagttccgcgttacataacttacgggaatttccaaacctggctgaccgcccaacgacccccgcccattgacgtcaataatgacgtatgttcccatagtaacgccaatagggaacttccattgacgtcaatgggtggagtatttacggtaaactgcccacttgggaatttccaagtgtatcatatgccaagtacgccccctattgacgtcaatgacgggaacttccataagcttgcattatgcccagtacatgaccttatgggaatttcctacttggcagtacatctacgtattagtcatcgctattaccatggtgatgcggttttggcagtacatcaatgggcgtggatagcggtttgactcacgggaacttccaagtctccaccccattgacgtcaatgggagtttgttttgactcaccaaaatcaacgggaattcccaaaatgtcgtaacaactccgccccattgacgcaaatgggcggtaggcgtgtacggtgggaggtctatataagcagagctcgtttagtgaaccgtcagatcgcctggagacgccatccacgctgttttgacctccatagaagacaccgggaccgatccagcctccatcggctcgcatctctccttcacgcgcccgccgccctacctgaggccgccatccacgccggttgagtcgcgttctgccgcctcccgcctgtggtgcctcctgaactgcgtccgccgtctaggtaagtttaaagctcaggtcgagaccgggcctttgtccggcgctcccttggagcctacctagactcagccggctctccacgctttgcctgaccctgcttgctcaactctagttaacggtggagggcagtgtagtctgagcagtactcgttgctgccgcgcgcgccaccagacataatagctgacagactaacagactgttcctttccatgggtcttttctgcagtcaccgtcgtcgacacgtgtgatcagatatcgcggccgctctagagatatcgccaccatggaagccagactgctggtgctgctgtgtgcctttgccgccacaaatgcagatacaatctgtattggctaccacgccaacaatagcaccgataccgtggatacagtgctggagaagaatgtgaccgtgacccactctgtgaatctgctggaggatagccacaatggcaagctgtgtaagctgaaaggaattgcccctctgcagctgggcaaatgtaatattgccggctggctgctgggaaatcctgaatgtgatctgctgctgacagccagcagctggtcttatatcgtggagaccagcaatagcgagaatggcacctgttaccctggcgacttcatcgattacgaggagctgagagaacagctgtctagcgtgtccagcttcgagaagttcgagatcttccctaagacaagcagctggcctaatcacacaacaaagggagtgacagccgcctgttcttatgccggagccagctccttttacagaaacctgctgtggctgacaaagaagggcagcagctaccctaagctgtctaagagctacgtgaacaacaagggcaaagaagtgctggtgctgtggggagtgcaccaccctcctacaggaacagatcagcagagcctgtaccagaatgccgatgcctatgtgtctgtgggcagcagcaagtacaacagaagattcacccctgaaattgccgccagacccaaagtgagagatcaggccggcagaatgaattactactggaccctgctggaacctggcgataccatcacatttgaggccaccggaaatctgattgccccttggtatgcctttgccctgaatagaggctctggctctggcatcattacatctgatgcccctgtgcacgactgtaataccaagtgtcagacacctcacggcgccattaatagcagcctgcccttccagaatattcaccctgtgaccatcggcgagtgtcctaagtatgtgaggagcaccaaactgagaatggccaccggcctgagaaatatccctagcatccagagcagaggactgtttggagccatcgccggctttattgagggaggatggaccggaatgatcgatggctggtacggctatcaccaccagaatgagcagggatctggatatgccgccgatcagaagtctacacagaacgccatcgacggcatcacaaacaaggtgaacagcgtgatcgagaagatgaacacccagtttacagctgtgggcaaggagttcaacaacctggagcggagaatcgagaacctgaacaagaaagtggacgacggcttcctggatatttggacctacaatgccgagctgctcgtgctcctggagaatgagagaaccctggacttccacgacagcaatgtgagaaacctgtacgagaaggtgaagagccagctgaagaacaatgccaaggagatcggcaacggctgctttgagttctaccacaagtgtgacgatgcctgtatggagtctgtgagaaacggcacctacgactaccctaagtatagcgaggagagcaagctgaatagagaggagatcgacggcgtgaaactggaaagcatgggcgtgtatcagatcctggccatctattctacagtggcctcttctctggtgctcctggtgtctctgggagccatcagcttttggatgtgtagcaatggcagcctgcagtgcagaatctgtatctgatgaacacgtgggatccagattctgctgtgccttctagttgccagccatctgttgtttgcccctcccccgtgccttccttgaccctggaaggtgccactcccactgtcctttcctaataaaatgaggaaattgcatcgcattgtctgagtaggtgtcattctattctggggggtggggtggggcaggacagcaagggggaggattgggaagacaatagcaggcatgctggggatgcggtgggctctatgggtacccaggtgctgaagaattgacccggttcctcctgggccagaaagaagcaggcacatccccttctctgtgacacaccctgtccacgcccctggttcttagttccagccccactcataggacactcatagctcaggagggctccgccttcaatcccacccgctaaagtacttggagcggtctctccctccctcatcagcccaccaaaccaaacctagcctccaagagtgggaagaaattaaagcaagataggctattaagtgcagagggagagaaaatgcctccaacatgtgaggaagtaatgagagaaatcatagaattttaaggccatgatttaaggccatcatggccttaatcttccgcttcctcgctcactgactcgctgcgctcggtcgttcggctgcggcgagcggtatcagctcactcaaaggcggtaatacggttatccacagaatcaggggataacgcaggaaagaacatgtgagcaaaaggccagcaaaaggccaggaaccgtaaaaaggccgcgttgctggcgtttttccataggctccgcccccctgacgagcatcacaaaaatcgacgctcaagtcagaggtggcgaaacccgacaggactataaagataccaggcgtttccccctggaagctccctcgtgcgctctcctgttccgaccctgccgcttaccggatacctgtccgcctttctcccttcgggaagcgtggcgctttctcatagctcacgctgtaggtatctcagttcggtgtaggtcgttcgctccaagctgggctgtgtgcacgaaccccccgttcagcccgaccgctgcgccttatccggtaactatcgtcttgagtccaacccggtaagacacgacttatcgccactggcagcagccactggtaacaggattagcagagcgaggtatgtaggcggtgctacagagttcttgaagtggtggcctaactacggctacactagaagaacagtatttggtatctgcgctctgctgaagccagttaccttcggaaaaagagttggtagctcttgatccggcaaacaaaccaccgctggtagcggtggtttttttgtttgcaagcagcagattacgcgcagaaaaaaaggatctcaagaagatcctttgatcttttctacggggtctgacgctcagtggaacgaaaactcacgttaagggattttggtcatgagattatcaaaaaggatcttcacctagatccttttaaattaaaaatgaagttttaaatcaatctaaagtatatatgagtaaacttggtctgacagttaccaatgcttaatcagtgaggcacctatctcagcgatctgtctatttcgttcatccatagttgcctgactcggggggggggggcgctgaggtctgcctcgtgaagaaggtgttgctgactcataccaggcctgaatcgccccatcatccagccagaaagtgagggagccacggttgatgagagctttgttgtaggtggaccagttggtgattttgaacttttgctttgccacggaacggtctgcgttgtcgggaagatgcgtgatctgatccttcaactcagcaaaagttcgatttattcaacaaagccgccgtcccgtcaagtcagcgtaatgctctgccagtgttacaaccaattaaccaattctgattagaaaaactcatcgagcatcaaatgaaactgcaatttattcatatcaggattatcaataccatatttttgaaaaagccgtttctgtaatgaaggagaaaactcaccgaggcagttccataggatggcaagatcctggtatcggtctgcgattccgactcgtccaacatcaatacaacctattaatttcccctcgtcaaaaataaggttatcaagtgagaaatcaccatgagtgacgactgaatccggtgagaatggcaaaagcttatgcatttctttccagacttgttcaacaggccagccattacgctcgtcatcaaaatcactcgcatcaaccaaaccgttattcattcgtgattgcgcctgagcgagacgaaatacgcgatcgctgttaaaaggacaattacaaacaggaatcgaatgcaaccggcgcaggaacactgccagcgcatcaacaatattttcacctgaatcaggatattcttctaatacctggaatgctgttttcccggggatcgcagtggtgagtaaccatgcatcatcaggagtacggataaaatgcttgatggtcggaagaggcataaattccgtcagccagtttagtctgaccatctcatctgtaacatcattggcaacgctacctttgccatgtttcagaaacaactctggcgcatcgggcttcccatacaatcgatagattgtcgcacctgattgcccgacattatcgcgagcccatttatacccatataaatcagcatccatgttggaatttaatcgcggcctcgagcaagacgtttcccgttgaatatggctcataacaccccttgtattactgtttatgtaagcagacagttttattgttcatgatgatatatttttatcttgtgcaatgtaacatcagagattttgagacacaacgtggctttccccccccccccattattgaagcatttatcagggttattgtctcatgagcggatacatatttgaatgtatttagaaaaataaacaaataggggttccgcgcacatttccccgaaaagtgccacctgacgtctaagaaaccattattatcatgacattaacctataaaaataggcgtatcacgaggccctttcgtc

SEQ ID NO: 42 - DNA, 1695 bp, Influenza A virus
  CDS (1)..(1695)
atggaagccagactgctggtgctgctgtgtgcctttgccgccacaaatgcagatacaatctgtattggctaccacgccaacaatagcaccgataccgtggatacagtgctggagaagaatgtgaccgtgacccactctgtgaatctgctggaggatagccacaatggcaagctgtgtaagctgaaaggaattgcccctctgcagctgggcaaatgtaatattgccggctggctgctgggaaatcctgaatgtgatctgctgctgacagccagcagctggtcttatatcgtggagaccagcaatagcgagaatggcacctgttaccctggcgacttcatcgattacgaggagctgagagaacagctgtctagcgtgtccagcttcgagaagttcgagatcttccctaagacaagcagctggcctaatcacacaacaaagggagtgacagccgcctgttcttatgccggagccagctccttttacagaaacctgctgtggctgacaaagaagggcagcagctaccctaagctgtctaagagctacgtgaacaacaagggcaaagaagtgctggtgctgtggggagtgcaccaccctcctacaggaacagatcagcagagcctgtaccagaatgccgatgcctatgtgtctgtgggcagcagcaagtacaacagaagattcacccctgaaattgccgccagacccaaagtgagagatcaggccggcagaatgaattactactggaccctgctggaacctggcgataccatcacatttgaggccaccggaaatctgattgccccttggtatgcctttgccctgaatagaggctctggctctggcatcattacatctgatgcccctgtgcacgactgtaataccaagtgtcagacacctcacggcgccattaatagcagcctgcccttccagaatattcaccctgtgaccatcggcgagtgtcctaagtatgtgaggagcaccaaactgagaatggccaccggcctgagaaatatccctagcatccagagcagaggactgtttggagccatcgccggctttattgagggaggatggaccggaatgatcgatggctggtacggctatcaccaccagaatgagcagggatctggatatgccgccgatcagaagtctacacagaacgccatcgacggcatcacaaacaaggtgaacagcgtgatcgagaagatgaacacccagtttacagctgtgggcaaggagttcaacaacctggagcggagaatcgagaacctgaacaagaaagtggacgacggcttcctggatatttggacctacaatgccgagctgctcgtgctcctggagaatgagagaaccctggacttccacgacagcaatgtgagaaacctgtacgagaaggtgaagagccagctgaagaacaatgccaaggagatcggcaacggctgctttgagttctaccacaagtgtgacgatgcctgtatggagtctgtgagaaacggcacctacgactaccctaagtatagcgaggagagcaagctgaatagagaggagatcgacggcgtgaaactggaaagcatgggcgtgtatcagatcctggccatctattctacagtggcctcttctctggtgctcctggtgtctctgggagccatcagcttttggatgtgtagcaatggcagcctgcagtgcagaatctgtatc

SEQ ID NO: 43 - protein, 565 aa, Influenza A virus
MEARLLVLLCAFAATNADTICIGYHANNSTDTVDTVLEKNVTVTHSVNLLEDSHNGKLCKLKGIAPLQLGKCNIAGWLLGNPECDLLLTASSWSYIVETSNSENGTCYPGDFIDYEELREQLSSVSSFEKFEIFPKTSSWPNHTTKGVTAACSYAGASSFYRNLLWLTKKGSSYPKLSKSYVNNKGKEVLVLWGVHHPPTGTDQQSLYQNADAYVSVGSSKYNRRFTPEIAARPKVRDQAGRMNYYWTLLEPGDTITFEATGNLIAPWYAFALNRGSGSGIITSDAPVHDCNTKCQTPHGAINSSLPFQNIHPVTIGECPKYVRSTKLRMATGLRNIPSIQSRGLFGAIAGFIEGGWTGMIDGWYGYHHQNEQGSGYAADQKSTQNAIDGITNKVNSVIEKMNTQFTAVGKEFNNLERRIENLNKKVDDGFLDIWTYNAELLVLLENERTLDFHDSNVRNLYEKVKSQLKNNAKEIGNGCFEFYHKCDDACMESVRNGTYDYPKYSEESKLNREEIDGVKLESMGVYQILAIYSTVASSLVLLVSLGAISFWMCSNGSLQCRICI

SEQ ID NO: 44 - DNA, 6124 bp, Influenza A virus
gacgaaagggcctcgtgatacgcctatttttataggttaatgtcatgataataatggtttcttagacgtcaggtggcacttttcggggaaatgtgcgcggaacccctatttgtttatttttctaaatacattcaaatatgtatccgctcatgagacaataaccctgataaatgcttcaataatggggggggggggaaagccacgttgtgtctcaaaatctctgatgttacattgcacaagataaaaatatatcatcatgaacaataaaactgtctgcttacataaacagtaatacaaggggtgttatgagccatattcaacgggaaacgtcttgctcgaggccgcgattaaattccaacatggatgctgatttatatgggtataaatgggctcgcgataatgtcgggcaatcaggtgcgacaatctatcgattgtatgggaagcccgatgcgccagagttgtttctgaaacatggcaaaggtagcgttgccaatgatgttacagatgagatggtcagactaaactggctgacggaatttatgcctcttccgaccatcaagcattttatccgtactcctgatgatgcatggttactcaccactgcgatccccgggaaaacagcattccaggtattagaagaatatcctgattcaggtgaaaatattgttgatgcgctggcagtgttcctgcgccggttgcattcgattcctgtttgtaattgtccttttaacagcgatcgcgtatttcgtctcgctcaggcgcaatcacgaatgaataacggtttggttgatgcgagtgattttgatgacgagcgtaatggctggcctgttgaacaagtctggaaagaaatgcataagcttttgccattctcaccggattcagtcgtcactcatggtgatttctcacttgataaccttatttttgacgaggggaaattaataggttgtattgatgttggacgagtcggaatcgcagaccgataccaggatcttgccatcctatggaactgcctcggtgagttttctccttcattacagaaacggctttttcaaaaatatggtattgataatcctgatatgaataaattgcagtttcatttgatgctcgatgagtttttctaatcagaattggttaattggttgtaacactggcagagcattacgctgacttgacgggacggcggctttgttgaataaatcgaacttttgctgagttgaaggatcagatcacgcatcttcccgacaacgcagaccgttccgtggcaaagcaaaagttcaaaatcaccaactggtccacctacaacaaagctctcatcaaccgtggctccctcactttctggctggatgatggggcgattcaggcctggtatgagtcagcaacaccttcttcacgaggcagacctcagcgccccccccccccgagtcaggcaactatggatgaacgaaatagacagatcgctgagataggtgcctcactgattaagcattggtaactgtcagaccaagtttactcatatatactttagattgatttaaaacttcatttttaatttaaaaggatctaggtgaagatcctttttgataatctcatgaccaaaatcccttaacgtgagttttcgttccactgagcgtcagaccccgtagaaaagatcaaaggatcttcttgagatcctttttttctgcgcgtaatctgctgcttgcaaacaaaaaaaccaccgctaccagcggtggtttgtttgccggatcaagagctaccaactctttttccgaaggtaactggcttcagcagagcgcagataccaaatactgttcttctagtgtagccgtagttaggccaccacttcaagaactctgtagcaccgcctacatacctcgctctgctaatcctgttaccagtggctgctgccagtggcgataagtcgtgtcttaccgggttggactcaagacgatagttaccggataaggcgcagcggtcgggctgaacggggggttcgtgcacacagcccagcttggagcgaacgacctacaccgaactgagatacctacagcgtgagctatgagaaagcgccacgcttcccgaagggagaaaggcggacaggtatccggtaagcggcagggtcggaacaggagagcgcacgagggagcttccagggggaaacgcctggtatctttatagtcctgtcgggtttcgccacctctgacttgagcgtcgatttttgtgatgctcgtcaggggggcggagcctatggaaaaacgccagcaacgcggcctttttacggttcctggccttttgctggccttttgctcacatgttctttcctgcgttatcccctgattctgtggataaccgtattaccgcctttgagtgagctgataccgctcgccgcagccgaacgaccgagcgcagcgagtcagtgagcgaggaagcggaagattaaggccatgatggccttaaatcatggccttaaaattctatgatttctctcattacttcctcacatgttggaggcattttctctccctctgcacttaatagcctatcttgctttaatttcttcccactcttggaggctaggtttggtttggtgggctgatgagggagggagagaccgctccaagtactttagcgggtgggattgaaggcggagccctcctgagctatgagtgtcctatgagtggggctggaactaagaaccaggggcgtggacagggtgtgtcacagagaaggggatgtgcctgcttctttctggcccaggaggaaccgggtcaattcttcagcacctgggtacccatagagcccaccgcatccccagcatgcctgctattgtcttcccaatcctcccccttgctgtcctgccccaccccaccccccagaatagaatgacacctactcagacaatgcgatgcaatttcctcattttattaggaaaggacagtgggagtggcaccttccagggtcaaggaaggcacgggggaggggcaaacaacagatggctggcaactagaaggcacagcagaatctggatcccacgtgttcatcagatacagattctgcactgcaggctgccattgctacacatccaaaagctgatggctcccagagacaccaggagcaccagagaagaggccactgtagaatagatggccaggatctgatacacgcccatgctttccagtttcacgccgtcgatctcctctctattcagcttgctctcctcgctatacttagggtagtcgtaggtgccgtttctcacagactccatacaggcatcgtcacacttgtggtagaactcaaagcagccgttgccgatctccttggcattgttcttcagctggctcttcaccttctcgtacaggtttctcacattgctgtcgtggaagtccagggttctctcattctccaggagcacgagcagctcggcattgtaggtccaaatatccaggaagccgtcgtccactttcttgttcaggttctcgattctccgctccaggttgttgaactccttgcccacagctgtaaactgggtgttcatcttctcgatcacgctgttcaccttgtttgtgatgccgtcgatggcgttctgtgtagacttctgatcggcggcatatccagatccctgctcattctggtggtgatagccgtaccagccatcgatcattccggtccatcctccctcaataaagccggcgatggctccaaacagtcctctgctctggatgctagggatatttctcaggccggtggccattctcagtttggtgctcctcacatacttaggacactcgccgatggtcacagggtgaatattctggaagggcaggctgctattaatggcgccgtgaggtgtctgacacttggtattacagtcgtgcacaggggcatcagatgtaatgatgccagagccagagcctctattcagggcaaaggcataccaaggggcaatcagatttccggtggcctcaaatgtgatggtatcgccaggttccagcagggtccagtagtaattcattctgccggcctgatctctcactttgggtctggcggcaatttcaggggtgaatcttctgttgtacttgctgctgcccacagacacataggcatcggcattctggtacaggctctgctgatctgttcctgtaggagggtggtgcactccccacagcaccagcacttctttgcccttgttgttcacgtagctcttagacagcttagggtagctgctgcccttctttgtcagccacagcaggtttctgtaaaaggagctggctccggcataagaacaggcggctgtcactccctttgttgtgtgattaggccagctgcttgtcttagggaagatctcgaacttctcgaagctggacacgctagacagctgttctctcagctcctcgtaatcgatgaagtcgccagggtaacaggtgccattctcgctattgctggtctccacgatataagaccagctgctggctgtcagcagcagatcacattcaggatttcccagcagccagccggcaatattacatttgcccagctgcagaggggcaattcctttcagcttacacagcttgccattgtggctatcctccagcagattcacagagtgggtcacggtcacattcttctccagcactgtatccacggtatcggtgctattgttggcgtggtagccaatacagattgtatctgcatttgtggcggcaaaggcacacagcagcaccagcagtctggcttccatggtggcgatatctctagagcggccgcgatatctgatcacacgtgtcgacgacggtgactgcagaaaagacccatggaaaggaacagtctgttagtctgtcagctattatgtctggtggcgcgcgcggcagcaacgagtactgctcagactacactgccctccaccgttaactagagttgagcaagcagggtcaggcaaagcgtggagagccggctgagtctaggtaggctccaagggagcgccggacaaaggcccggtctcgacctgagctttaaacttacctagacggcggacgcagttcaggaggcaccacaggcgggaggcggcagaacgcgactcaaccggcgtggatggcggcctcaggtagggcggcgggcgcgtgaaggagagatgcgagccgatggaggctggatcggtcccggtgtcttctatggaggtcaaaacagcgtggatggcgtctccaggcgatctgacggttcactaaacgagctctgcttatatagacctcccaccgtacacgcctaccgcccatttgcgtcaatggggcggagttgttacgacattttgggaattcccgttgattttggtgagtcaaaacaaactcccattgacgtcaatggggtggagacttggaagttcccgtgagtcaaaccgctatccacgcccattgatgtactgccaaaaccgcatcaccatggtaatagcgatgactaatacgtagatgtactgccaagtaggaaattcccataaggtcatgtactgggcataatgcaagcttatggaagttcccgtcattgacgtcaatagggggcgtacttggcatatgatacacttggaaattcccaagtgggcagtttaccgtaaatactccacccattgacgtcaatggaagttccctattggcgttactatgggaacatacgtcattattgacgtcaatgggcgggggtcgttgggcggtcagccaggtttggaaattcccgtaagttatgtaacgcggaactccatatatgggctatggaagttcccgtaattgattactattaataactagtcaataatcaatgtcaacatggcggtaatgttggacatgagccaatataaatgtacatattatgatatggatacaacgtatgcaatggccaatagccaatctgatgcggtattttctccttacgcatctgtgcggtatttcacaccgcatatggtgcactctcagtacaatctgctctgatgccgcatagttaagccagccccgacacccgccaacacccgctgacgcgccctgacgggcttgtctgctcccggcatccgcttacagacaagctgtgaccgtctccgggagctgcatgtgtcagaggttttcaccgtcatcaccgaaacgcgcga

SEQ ID NO: 45 - DNA, 6127 bp, Influenza A virus
tcgcgcgtttcggtgatgacggtgaaaacctctgacacatgcagctcccggagacggtcacagcttgtctgtaagcggatgccgggagcagacaagcccgtcagggcgcgtcagcgggtgttggcgggtgtcggggctggcttaactatgcggcatcagagcagattgtactgagagtgcaccatatgcggtgtgaaataccgcacagatgcgtaaggagaaaataccgcatcagattggctattggccattgcatacgttgtatccatatcataatatgtacatttatattggctcatgtccaacattaccgccatgttgacattgattattgactagttattaatagtaatcaattacgggaacttccatagcccatatatggagttccgcgttacataacttacgggaatttccaaacctggctgaccgcccaacgacccccgcccattgacgtcaataatgacgtatgttcccatagtaacgccaatagggaacttccattgacgtcaatgggtggagtatttacggtaaactgcccacttgggaatttccaagtgtatcatatgccaagtacgccccctattgacgtcaatgacgggaacttccataagcttgcattatgcccagtacatgaccttatgggaatttcctacttggcagtacatctacgtattagtcatcgctattaccatggtgatgcggttttggcagtacatcaatgggcgtggatagcggtttgactcacgggaacttccaagtctccaccccattgacgtcaatgggagtttgttttgactcaccaaaatcaacgggaattcccaaaatgtcgtaacaactccgccccattgacgcaaatgggcggtaggcgtgtacggtgggaggtctatataagcagagctcgtttagtgaaccgtcagatcgcctggagacgccatccacgctgttttgacctccatagaagacaccgggaccgatccagcctccatcggctcgcatctctccttcacgcgcccgccgccctacctgaggccgccatccacgccggttgagtcgcgttctgccgcctcccgcctgtggtgcctcctgaactgcgtccgccgtctaggtaagtttaaagctcaggtcgagaccgggcctttgtccggcgctcccttggagcctacctagactcagccggctctccacgctttgcctgaccctgcttgctcaactctagttaacggtggagggcagtgtagtctgagcagtactcgttgctgccgcgcgcgccaccagacataatagctgacagactaacagactgttcctttccatgggtcttttctgcagtcaccgtcgtcgacacgtgtgatcagatatcgcggccgctctagagatatcgccaccatggaagccagactgctggtgctgctgtgtgcctttgccgccacaaatgcagatacaatctgtattggctaccacgccaacaatagcaccgataccgtggatacagtgctggagaagaatgtgaccgtgacccactctgtgaatctgctggaggatagccacaatggcaagctgtgtaagctgaaaggaattgcccctctgcagctgggcaaatgtaatattgccggctggctgctgggaaatcctgaatgtgatctgctgctgacagccagcagctggtcttatatcgtggagaccagcaatagcgagaatggcacctgttaccctggcgacttcatcgattacgaggagctgagagaacagctgtctagcgtgtccagcttcgagaagttcgagatcttccctaagacaagcagctggcctaatcacgagacaacaaagggagtgacagccgcctgttcttatgccggagccagctccttttacagaaacctgctgtggctgacaaagaagggcagcagctaccctaacctgtctaagagctacgtgaacaacaagggcaaagaagtgctggtgctgtggggagtgcaccaccctcctacaggaacagatcagcagagcctgtaccagaatgccgatgcctatgtgtctgtgggcagcagcaagtacaacagaagattcacccctgaaattgccgccagacccaaagtgagagatcaggccggcagaatgaattactactggaccctgctggaacctggcgataccatcacatttgaggccaccggaaatctgattgccccttggtatgcctttgccctgaatagaggctctggctctggcatcattacatctgatgcccctgtgcacgactgtaataccaagtgtcagacacctcacggcgccattaatagcagcctgcccttccagaatattcaccctgtgaccatcggcgagtgtcctaagtatgtgaggagcaccaaactgagaatggccaccggcctgagaaatatccctagcatccagagcagaggactgtttggagccatcgccggctttattgagggaggatggaccggaatgatcgatggctggtacggctatcaccaccagaatgagcagggatctggatatgccgccgatcagaagtctacacagaacgccatcgacggcatcacaaacaaggtgaacagcgtgatcgagaagatgaacacccagtttacagctgtgggcaaggagttcaacaacctggagcggagaatcgagaacctgaacaagaaagtggacgacggcttcctggatatttggacctacaatgccgagctgctcgtgctcctggagaatgagagaaccctggacttccacgacagcaatgtgagaaacctgtacgagaaggtgaagagccagctgaagaacaatgccaaggagatcggcaacggctgctttgagttctaccacaagtgtgacgatgcctgtatggagtctgtgagaaacggcacctacgactaccctaagtatagcgaggagagcaagctgaatagagaggagatcgacggcgtgaaactggaaagcatgggcgtgtatcagatcctggccatctattctacagtggcctcttctctggtgctcctggtgtctctgggagccatcagcttttggatgtgtagcaatggcagcctgcagtgcagaatctgtatctgatgaacacgtgggatccagattctgctgtgccttctagttgccagccatctgttgtttgcccctcccccgtgccttccttgaccctggaaggtgccactcccactgtcctttcctaataaaatgaggaaattgcatcgcattgtctgagtaggtgtcattctattctggggggtggggtggggcaggacagcaagggggaggattgggaagacaatagcaggcatgctggggatgcggtgggctctatgggtacccaggtgctgaagaattgacccggttcctcctgggccagaaagaagcaggcacatccccttctctgtgacacaccctgtccacgcccctggttcttagttccagccccactcataggacactcatagctcaggagggctccgccttcaatcccacccgctaaagtacttggagcggtctctccctccctcatcagcccaccaaaccaaacctagcctccaagagtgggaagaaattaaagcaagataggctattaagtgcagagggagagaaaatgcctccaacatgtgaggaagtaatgagagaaatcatagaattttaaggccatgatttaaggccatcatggccttaatcttccgcttcctcgctcactgactcgctgcgctcggtcgttcggctgcggcgagcggtatcagctcactcaaaggcggtaatacggttatccacagaatcaggggataacgcaggaaagaacatgtgagcaaaaggccagcaaaaggccaggaaccgtaaaaaggccgcgttgctggcgtttttccataggctccgcccccctgacgagcatcacaaaaatcgacgctcaagtcagaggtggcgaaacccgacaggactataaagataccaggcgtttccccctggaagctccctcgtgcgctctcctgttccgaccctgccgcttaccggatacctgtccgcctttctcccttcgggaagcgtggcgctttctcatagctcacgctgtaggtatctcagttcggtgtaggtcgttcgctccaagctgggctgtgtgcacgaaccccccgttcagcccgaccgctgcgccttatccggtaactatcgtcttgagtccaacccggtaagacacgacttatcgccactggcagcagccactggtaacaggattagcagagcgaggtatgtaggcggtgctacagagttcttgaagtggtggcctaactacggctacactagaagaacagtatttggtatctgcgctctgctgaagccagttaccttcggaaaaagagttggtagctcttgatccggcaaacaaaccaccgctggtagcggtggtttttttgtttgcaagcagcagattacgcgcagaaaaaaaggatctcaagaagatcctttgatcttttctacggggtctgacgctcagtggaacgaaaactcacgttaagggattttggtcatgagattatcaaaaaggatcttcacctagatccttttaaattaaaaatgaagttttaaatcaatctaaagtatatatgagtaaacttggtctgacagttaccaatgcttaatcagtgaggcacctatctcagcgatctgtctatttcgttcatccatagttgcctgactcggggggggggggcgctgaggtctgcctcgtgaagaaggtgttgctgactcataccaggcctgaatcgccccatcatccagccagaaagtgagggagccacggttgatgagagctttgttgtaggtggaccagttggtgattttgaacttttgctttgccacggaacggtctgcgttgtcgggaagatgcgtgatctgatccttcaactcagcaaaagttcgatttattcaacaaagccgccgtcccgtcaagtcagcgtaatgctctgccagtgttacaaccaattaaccaattctgattagaaaaactcatcgagcatcaaatgaaactgcaatttattcatatcaggattatcaataccatatttttgaaaaagccgtttctgtaatgaaggagaaaactcaccgaggcagttccataggatggcaagatcctggtatcggtctgcgattccgactcgtccaacatcaatacaacctattaatttcccctcgtcaaaaataaggttatcaagtgagaaatcaccatgagtgacgactgaatccggtgagaatggcaaaagcttatgcatttctttccagacttgttcaacaggccagccattacgctcgtcatcaaaatcactcgcatcaaccaaaccgttattcattcgtgattgcgcctgagcgagacgaaatacgcgatcgctgttaaaaggacaattacaaacaggaatcgaatgcaaccggcgcaggaacactgccagcgcatcaacaatattttcacctgaatcaggatattcttctaatacctggaatgctgttttcccggggatcgcagtggtgagtaaccatgcatcatcaggagtacggataaaatgcttgatggtcggaagaggcataaattccgtcagccagtttagtctgaccatctcatctgtaacatcattggcaacgctacctttgccatgtttcagaaacaactctggcgcatcgggcttcccatacaatcgatagattgtcgcacctgattgcccgacattatcgcgagcccatttatacccatataaatcagcatccatgttggaatttaatcgcggcctcgagcaagacgtttcccgttgaatatggctcataacaccccttgtattactgtttatgtaagcagacagttttattgttcatgatgatatatttttatcttgtgcaatgtaacatcagagattttgagacacaacgtggctttccccccccccccattattgaagcatttatcagggttattgtctcatgagcggatacatatttgaatgtatttagaaaaataaacaaataggggttccgcgcacatttccccgaaaagtgccacctgacgtctaagaaaccattattatcatgacattaacctataaaaataggcgtatcacgaggccctttcgtc

SEQ ID NO: 46 - DNA, 1698 bp, Influenza A virus
  CDS (1)..(1698)
atggaagccagactgctggtgctgctgtgtgcctttgccgccacaaatgcagatacaatctgtattggctaccacgccaacaatagcaccgataccgtggatacagtgctggagaagaatgtgaccgtgacccactctgtgaatctgctggaggatagccacaatggcaagctgtgtaagctgaaaggaattgcccctctgcagctgggcaaatgtaatattgccggctggctgctgggaaatcctgaatgtgatctgctgctgacagccagcagctggtcttatatcgtggagaccagcaatagcgagaatggcacctgttaccctggcgacttcatcgattacgaggagctgagagaacagctgtctagcgtgtccagcttcgagaagttcgagatcttccctaagacaagcagctggcctaatcacgagacaacaaagggagtgacagccgcctgttcttatgccggagccagctccttttacagaaacctgctgtggctgacaaagaagggcagcagctaccctaacctgtctaagagctacgtgaacaacaagggcaaagaagtgctggtgctgtggggagtgcaccaccctcctacaggaacagatcagcagagcctgtaccagaatgccgatgcctatgtgtctgtgggcagcagcaagtacaacagaagattcacccctgaaattgccgccagacccaaagtgagagatcaggccggcagaatgaattactactggaccctgctggaacctggcgataccatcacatttgaggccaccggaaatctgattgccccttggtatgcctttgccctgaatagaggctctggctctggcatcattacatctgatgcccctgtgcacgactgtaataccaagtgtcagacacctcacggcgccattaatagcagcctgcccttccagaatattcaccctgtgaccatcggcgagtgtcctaagtatgtgaggagcaccaaactgagaatggccaccggcctgagaaatatccctagcatccagagcagaggactgtttggagccatcgccggctttattgagggaggatggaccggaatgatcgatggctggtacggctatcaccaccagaatgagcagggatctggatatgccgccgatcagaagtctacacagaacgccatcgacggcatcacaaacaaggtgaacagcgtgatcgagaagatgaacacccagtttacagctgtgggcaaggagttcaacaacctggagcggagaatcgagaacctgaacaagaaagtggacgacggcttcctggatatttggacctacaatgccgagctgctcgtgctcctggagaatgagagaaccctggacttccacgacagcaatgtgagaaacctgtacgagaaggtgaagagccagctgaagaacaatgccaaggagatcggcaacggctgctttgagttctaccacaagtgtgacgatgcctgtatggagtctgtgagaaacggcacctacgactaccctaagtatagcgaggagagcaagctgaatagagaggagatcgacggcgtgaaactggaaagcatgggcgtgtatcagatcctggccatctattctacagtggcctcttctctggtgctcctggtgtctctgggagccatcagcttttggatgtgtagcaatggcagcctgcagtgcagaatctgtatc

SEQ ID NO: 47 - protein, 566 aa, Influenza A virus
MEARLLVLLCAFAATNADTICIGYHANNSTDTVDTVLEKNVTVTHSVNLLEDSHNGKLCKLKGIAPLQLGKCNIAGWLLGNPECDLLLTASSWSYIVETSNSENGTCYPGDFIDYEELREQLSSVSSFEKFEIFPKTSSWPNHETTKGVTAACSYAGASSFYRNLLWLTKKGSSYPNLSKSYVNNKGKEVLVLWGVHHPPTGTDQQSLYQNADAYVSVGSSKYNRRFTPEIAARPKVRDQAGRMNYYWTLLEPGDTITFEATGNLIAPWYAFALNRGSGSGIITSDAPVHDCNTKCQTPHGAINSSLPFQNIHPVTIGECPKYVRSTKLRMATGLRNIPSIQSRGLFGAIAGFIEGGWTGMIDGWYGYHHQNEQGSGYAADQKSTQNAIDGITNKVNSVIEKMNTQFTAVGKEFNNLERRIENLNKKVDDGFLDIWTYNAELLVLLENERTLDFHDSNVRNLYEKVKSQLKNNAKEIGNGCFEFYHKCDDACMESVRNGTYDYPKYSEESKLNREEIDGVKLESMGVYQILAIYSTVASSLVLLVSLGAISFWMCSNGSLQCRICI

SEQ ID NO: 48 - DNA, 6127 bp, Influenza A virus
gacgaaagggcctcgtgatacgcctatttttataggttaatgtcatgataataatggtttcttagacgtcaggtggcacttttcggggaaatgtgcgcggaacccctatttgtttatttttctaaatacattcaaatatgtatccgctcatgagacaataaccctgataaatgcttcaataatggggggggggggaaagccacgttgtgtctcaaaatctctgatgttacattgcacaagataaaaatatatcatcatgaacaataaaactgtctgcttacataaacagtaatacaaggggtgttatgagccatattcaacgggaaacgtcttgctcgaggccgcgattaaattccaacatggatgctgatttatatgggtataaatgggctcgcgataatgtcgggcaatcaggtgcgacaatctatcgattgtatgggaagcccgatgcgccagagttgtttctgaaacatggcaaaggtagcgttgccaatgatgttacagatgagatggtcagactaaactggctgacggaatttatgcctcttccgaccatcaagcattttatccgtactcctgatgatgcatggttactcaccactgcgatccccgggaaaacagcattccaggtattagaagaatatcctgattcaggtgaaaatattgttgatgcgctggcagtgttcctgcgccggttgcattcgattcctgtttgtaattgtccttttaacagcgatcgcgtatttcgtctcgctcaggcgcaatcacgaatgaataacggtttggttgatgcgagtgattttgatgacgagcgtaatggctggcctgttgaacaagtctggaaagaaatgcataagcttttgccattctcaccggattcagtcgtcactcatggtgatttctcacttgataaccttatttttgacgaggggaaattaataggttgtattgatgttggacgagtcggaatcgcagaccgataccaggatcttgccatcctatggaactgcctcggtgagttttctccttcattacagaaacggctttttcaaaaatatggtattgataatcctgatatgaataaattgcagtttcatttgatgctcgatgagtttttctaatcagaattggttaattggttgtaacactggcagagcattacgctgacttgacgggacggcggctttgttgaataaatcgaacttttgctgagttgaaggatcagatcacgcatcttcccgacaacgcagaccgttccgtggcaaagcaaaagttcaaaatcaccaactggtccacctacaacaaagctctcatcaaccgtggctccctcactttctggctggatgatggggcgattcaggcctggtatgagtcagcaacaccttcttcacgaggcagacctcagcgccccccccccccgagtcaggcaactatggatgaacgaaatagacagatcgctgagataggtgcctcactgattaagcattggtaactgtcagaccaagtttactcatatatactttagattgatttaaaacttcatttttaatttaaaaggatctaggtgaagatcctttttgataatctcatgaccaaaatcccttaacgtgagttttcgttccactgagcgtcagaccccgtagaaaagatcaaaggatcttcttgagatcctttttttctgcgcgtaatctgctgcttgcaaacaaaaaaaccaccgctaccagcggtggtttgtttgccggatcaagagctaccaactctttttccgaaggtaactggcttcagcagagcgcagataccaaatactgttcttctagtgtagccgtagttaggccaccacttcaagaactctgtagcaccgcctacatacctcgctctgctaatcctgttaccagtggctgctgccagtggcgataagtcgtgtcttaccgggttggactcaagacgatagttaccggataaggcgcagcggtcgggctgaacggggggttcgtgcacacagcccagcttggagcgaacgacctacaccgaactgagatacctacagcgtgagctatgagaaagcgccacgcttcccgaagggagaaaggcggacaggtatccggtaagcggcagggtcggaacaggagagcgcacgagggagcttccagggggaaacgcctggtatctttatagtcctgtcgggtttcgccacctctgacttgagcgtcgatttttgtgatgctcgtcaggggggcggagcctatggaaaaacgccagcaacgcggcctttttacggttcctggccttttgctggccttttgctcacatgttctttcctgcgttatcccctgattctgtggataaccgtattaccgcctttgagtgagctgataccgctcgccgcagccgaacgaccgagcgcagcgagtcagtgagcgaggaagcggaagattaaggccatgatggccttaaatcatggccttaaaattctatgatttctctcattacttcctcacatgttggaggcattttctctccctctgcacttaatagcctatcttgctttaatttcttcccactcttggaggctaggtttggtttggtgggctgatgagggagggagagaccgctccaagtactttagcgggtgggattgaaggcggagccctcctgagctatgagtgtcctatgagtggggctggaactaagaaccaggggcgtggacagggtgtgtcacagagaaggggatgtgcctgcttctttctggcccaggaggaaccgggtcaattcttcagcacctgggtacccatagagcccaccgcatccccagcatgcctgctattgtcttcccaatcctcccccttgctgtcctgccccaccccaccccccagaatagaatgacacctactcagacaatgcgatgcaatttcctcattttattaggaaaggacagtgggagtggcaccttccagggtcaaggaaggcacgggggaggggcaaacaacagatggctggcaactagaaggcacagcagaatctggatcccacgtgttcatcagatacagattctgcactgcaggctgccattgctacacatccaaaagctgatggctcccagagacaccaggagcaccagagaagaggccactgtagaatagatggccaggatctgatacacgcccatgctttccagtttcacgccgtcgatctcctctctattcagcttgctctcctcgctatacttagggtagtcgtaggtgccgtttctcacagactccatacaggcatcgtcacacttgtggtagaactcaaagcagccgttgccgatctccttggcattgttcttcagctggctcttcaccttctcgtacaggtttctcacattgctgtcgtggaagtccagggttctctcattctccaggagcacgagcagctcggcattgtaggtccaaatatccaggaagccgtcgtccactttcttgttcaggttctcgattctccgctccaggttgttgaactccttgcccacagctgtaaactgggtgttcatcttctcgatcacgctgttcaccttgtttgtgatgccgtcgatggcgttctgtgtagacttctgatcggcggcatatccagatccctgctcattctggtggtgatagccgtaccagccatcgatcattccggtccatcctccctcaataaagccggcgatggctccaaacagtcctctgctctggatgctagggatatttctcaggccggtggccattctcagtttggtgctcctcacatacttaggacactcgccgatggtcacagggtgaatattctggaagggcaggctgctattaatggcgccgtgaggtgtctgacacttggtattacagtcgtgcacaggggcatcagatgtaatgatgccagagccagagcctctattcagggcaaaggcataccaaggggcaatcagatttccggtggcctcaaatgtgatggtatcgccaggttccagcagggtccagtagtaattcattctgccggcctgatctctcactttgggtctggcggcaatttcaggggtgaatcttctgttgtacttgctgctgcccacagacacataggcatcggcattctggtacaggctctgctgatctgttcctgtaggagggtggtgcactccccacagcaccagcacttctttgcccttgttgttcacgtagctcttagacaggttagggtagctgctgcccttctttgtcagccacagcaggtttctgtaaaaggagctggctccggcataagaacaggcggctgtcactccctttgttgtctcgtgattaggccagctgcttgtcttagggaagatctcgaacttctcgaagctggacacgctagacagctgttctctcagctcctcgtaatcgatgaagtcgccagggtaacaggtgccattctcgctattgctggtctccacgatataagaccagctgctggctgtcagcagcagatcacattcaggatttcccagcagccagccggcaatattacatttgcccagctgcagaggggcaattcctttcagcttacacagcttgccattgtggctatcctccagcagattcacagagtgggtcacggtcacattcttctccagcactgtatccacggtatcggtgctattgttggcgtggtagccaatacagattgtatctgcatttgtggcggcaaaggcacacagcagcaccagcagtctggcttccatggtggcgatatctctagagcggccgcgatatctgatcacacgtgtcgacgacggtgactgcagaaaagacccatggaaaggaacagtctgttagtctgtcagctattatgtctggtggcgcgcgcggcagcaacgagtactgctcagactacactgccctccaccgttaactagagttgagcaagcagggtcaggcaaagcgtggagagccggctgagtctaggtaggctccaagggagcgccggacaaaggcccggtctcgacctgagctttaaacttacctagacggcggacgcagttcaggaggcaccacaggcgggaggcggcagaacgcgactcaaccggcgtggatggcggcctcaggtagggcggcgggcgcgtgaaggagagatgcgagccgatggaggctggatcggtcccggtgtcttctatggaggtcaaaacagcgtggatggcgtctccaggcgatctgacggttcactaaacgagctctgcttatatagacctcccaccgtacacgcctaccgcccatttgcgtcaatggggcggagttgttacgacattttgggaattcccgttgattttggtgagtcaaaacaaactcccattgacgtcaatggggtggagacttggaagttcccgtgagtcaaaccgctatccacgcccattgatgtactgccaaaaccgcatcaccatggtaatagcgatgactaatacgtagatgtactgccaagtaggaaattcccataaggtcatgtactgggcataatgcaagcttatggaagttcccgtcattgacgtcaatagggggcgtacttggcatatgatacacttggaaattcccaagtgggcagtttaccgtaaatactccacccattgacgtcaatggaagttccctattggcgttactatgggaacatacgtcattattgacgtcaatgggcgggggtcgttgggcggtcagccaggtttggaaattcccgtaagttatgtaacgcggaactccatatatgggctatggaagttcccgtaattgattactattaataactagtcaataatcaatgtcaacatggcggtaatgttggacatgagccaatataaatgtacatattatgatatggatacaacgtatgcaatggccaatagccaatctgatgcggtattttctccttacgcatctgtgcggtatttcacaccgcatatggtgcactctcagtacaatctgctctgatgccgcatagttaagccagccccgacacccgccaacacccgctgacgcgccctgacgggcttgtctgctcccggcatccgcttacagacaagctgtgaccgtctccgggagctgcatgtgtcagaggttttcaccgtcatcaccgaaacgcgcga

SEQ ID NO: 49 - protein, 566 aa, Influenza A virus; identical to SEQ ID NO: 3

SEQ ID NO: 50 - DNA, 1701 bp, Influenza A virus
atgaaggcaatactagtagttctgctatatacatttgcaaccgcaaatgcagacacattatgtataggttatcatgcgaacaattcaacagacactgtagacacagtactagaaaagaatgtaacagtaacacactctgttaaccttctagaagacaagcataacgggaaactatgcaaactaagaggggtagccccattgcatttgggtaaatgtaacattgctggctggatcctgggaaatccagagtgtgaatcactctccacagcaagctcatggtcctacattgtggaaacacctagttcagacaatggaacgtgttacccaggagatttcatcgattatgaggagctaagagagcaattgagctcagtgtcatcatttgaaaggtttgagatattccccaagacaagttcatggcccaatcatgactcgaacaaaggtgtaacggcagcatgtcctcatgctggagcaaaaagcttctacaaaaatttaatatggctagttaaaaaaggaaattcatacccaaagctcagcaaatcctacattaatgataaagggaaagaagtcctcgtgctatggggcattcaccatccatctactagtgctgaccaacaaagtctctatcagaatgcagatacatatgtttttgtggggtcatcaagatacagcaagaagttcaagccggaaatagcaataagacccaaagtgagggatcaagaagggagaatgaactattactggacactagtagagccgggagacaaaataacattcgaagcaactggaaatctagtggtaccgagatatgcattcgcaatggaaagaaatgctggatctggtattatcatttcagatacaccagtccacgattgcaatacaacttgtcaaacacccaagggtgctataaacaccagcctcccatttcagaatatacatccgatcacaattggaaaatgtccaaaatatgtaaaaagcacaaaattgagactggccacaggattgaggaatatcccgtctattcaatctagaggcctatttggggccattgccggtttcattgaaggggggtggacagggatggtagatggatggtacggttatcaccatcaaaatgagcaggggtcaggatatgcagccgacctgaagagcacacagaatgccattgacgagattactaacaaagtaaattctgttattgaaaagatgaatacacagttcacagcagtaggtaaagagttcaaccacctggaaaaaagaatagagaatttaaataaaaaagttgatgatggtttcctggacatttggacttacaatgccgaactgttggttctattggaaaatgaaagaactttggactaccacgattcaaatgtgaagaacttatatgaaaaggtaagaagccagctaaaaaacaatgccaaggaaattggaaacggctgctttgaattttaccacaaatgcgataacacgtgcatggaaagtgtcaaaaatgggacttatgactacccaaaatactcagaggaagcaaaattaaacagagaagaaatagatggggtaaagctggaatcaacaaggatttaccagattttggcgatctattcaactgtcgccagttcattggtactggtagtctccctgggggcaatcagtttctggatgtgctctaatgggtctctacagtgtagaatatgtatttaa

SEQ ID NO: 51 - protein, 566 aa, Influenza A virus
  MISC_FEATURE (497)..(497): Xaa = unknown
MKAILVVLLYTFATANADTLCIGYHANNSTDTVDTVLEKNVTVTHSVNLLEEKHNGKLCKLRGVAPLHLGKCNIAGWILGNPECESLSTASSWSYIVETSSSDNGTCYPGDFIDYEELREQLSSVSSFERFEIFPKTSSWPNHDSNKGVTAACPHAGAKSFYKNLIWLVKKGNSYPKLSKSYINDKGKEVLVLWGIHHPSTSADQQSLYQNADAYVFVGTSRYSKKFKPEIAIRPKVREQEGRMNYYWTLVEPGDKITFEATGNLVVPRYAFAMERNAGSGIIISDTPVHDCNTTCQTPKGAINTSLPFQNIHPITIGKCPKYVKSTKLRLATGLRNVPSIQSRGLFGAIAGFIEGGWTGMVDGWYGYHHQNEQGSGYAADLKSTQNAIDEITNKVNSVIEKMNTQFTAVGKEFNHLEKRIENLNKKVDDGFLDIWTYNAELLVLLENERTLDYHDSNVKNLYEKVRSQLKNNAKEIGNGCFEFYHKCDNTCMESVXNGTYDYPKYSEEAKLNREEIDGVKLESTRIYQILAIYSTVASSLVLVVSLGAISFWMCSNGSLQCRICI

SEQ ID NO: 52 - protein, 566 aa, Influenza A virus
  MISC_FEATURE (310)..(310): Xaa = unknown
MEAILVVLLYTFATANADTLCIGYHANNSTDTVDTVLEKNVTVTHSVNLLEDKHNGKLCKLRGVAPLHLGKCNIAGWILGNPECESLSTASSWSYIVETSSSDNGTCYPGDFIDYEELREQLSSVSSFERFEIFPKTSSWPNHDSNKGVTAACPHAGAKSFYKNLIWLVKKGNSYPKLSKSYINDKGKEVLVLWGIHHPSTSADQQSLYQNADAYVFVGSSRYSKKFKPEIAIRPKVRDQEGRMNYYWTLVEPGDKITFEATGNLVVPRYAFAMERNAGSGIIISDTPVHDCNTTCQTPKGAINTSLPFXNIHPITIGKCPKYVKSTKLRLATGLRNVPSIQSRGLFGAIAGFIEGGWTGMVDGWYGYHHQNEQGSGYAADLKSTQNAIDEITNKVNSVIEKMNTQFTAVGKEFNHLEKRIENLNKKVDDGFLDIWTYNAELLVLLENERTLDYHDSNVKNLYEKVRSQLKNNAKEIGNGCFEFYHKCDNTCMESVKNGTYDYPKYSEEAKLNREEIDGVKLESTRIYQILAIYSTVASSLVLVVSLGAISFWMCSNGSLQCRICI

SEQ ID NO: 53 - protein, 566 aa, Influenza A virus
MKAILVVLLYTFATANADTLCIGYHANNSTDTVDTVLEKNVTVTHSVNLLEDKHNGKLCKLRGVAPLHLGKCNIAGWILGNPECESLSTASSWSYIVETSSSDNGTCYPGDFIDYEELREQLSSVSSFERFEIFPKTSSWPNHDSNKGVTAACPHAGAKSFYKNLIWLVKKGNSYPKLSKSYINDKGKEVLVLWGIHHPSTSADQQSLYQNADAYVFVGTSRYSKKFKPEIAIRPKVRDQEGRMNYYWKLVEPGDKITFEATGNLVVPRYAFAMERNAGSGIIISDTPVHDCNTTCQTPKGAINTSLPFQNIHPITIGKCPKYVKSTKLRLATGLRNVPSIQSRGLFGAIAGFIEGGWTGMVDGWYGYHHQNEQGSGYAADLKSTQNAIDEITNKVNSVIEKMNTQFTAVGKEFNHLEKRIENLNKKVDDGFLDIWTYNAELLVLLENERTLDYHDSNVKNLYEKVRSQLKNNAKEIGNGCFEFYHKCDNTCMESVKNGTYDYPKYSEEAKLNREEIDGVKLESTRIYQILAIYSTVASSLVLVVSLGAISFWMCSNGSLQCRICI

SEQ ID NO: 54 - protein, 566 aa, Influenza A virus
MKAILVVLLYTFATANADTLCIGYHANNSTDTVDTVLEKNVTVTHSVNLLEDKHNGKLCKLRGVAPLHLGKCNIAGWILGNPECESLSTASSWSYIVETSSSDNGTCYPGDFIDYEELREQLSSVSSFERFEIFPKTSSWPNHDSNKGVTAACPHAGAKSFYKNLIWLVKKGNSYPKLSKSYINDKGKEVLVLWGIHHPSTSADQQSLYQNADAYVFVGSSRYSKKFKPEIAIRPKVRGQEGRMNYYWTLVEPGDKITFEATGNLVVPRYAFAMERNAGSGIIISDTPVHDCNTTCQTPKGAINTSLPFQNIHPITIGKCPKYVKSTKLRLATGLRNVPSIQSRGLFGAIAGFIEGGWTGMVDGWYGYHHQNEQGSGYAADLKSTQNAIDEITNKVNSVIEKMNTQFTAVGKEFNHLEKRIENLNKKVDDGFLDIWTYNAELLVLLENERTLDYHDSNVKNLYEKVRSQLKNNAKEIGNGCFEFYHKCDNTCMESVKNGTYDYPKYSEEAKLNREEIDGVKLESTRFYQILAIYSTVASSLVLVVSLGAISFWMCSNGSLQCRICI

SEQ ID NO: 55 - protein, 566 aa, Influenza A virus
MKAILVVLLYTFATANADTLCIGYHANNSTDTVDTVLEKNVTVTHSVNLLEDKHNGKLCKLRGVAPLHLGKCNIAGWILGNPECESLSTASSWSYIVETSSSDNGTCYPGDFIDYEELREQLSSVSSFERFEIFPKTSSWPNHDSNKGVTAACPHAGAKSFYKNLIWLVKKGNSYPKLSKSYINDKGKEVLVLWGIHHPSTSADQQSLYQNADAYVFVGSSKYSKKFKPEIAIRPKVRDQEGRMNYYWTLVEPGDKITFEATGNLVVPRYAFAMERNAGSGIIISDTPVHDCNTTCQTPKGAINTSLPFQNIHPITIGKCPKYVKSTKLRLATGLRNVPSIQSRGLFGAIAGFIEGGWTGMVDGWYGYHHQNEQGSGYAADLKSTQNAIDEITNKVNSVIEKMNTQFTAVGKEFNHLEKRIENLNKKVDDGFLDIWTYNAELLVLLENERTLDYHDSNVKNLYEKVRSQLKNNAKEIGNGCFEFYHKCDNTCMESVKNGTYDYPKYSEEAKLNREEIDGVKLESTRVYQILAIYSTVASSLVLVVSLGAISFWMCSNGSLQCRICI

SEQ ID NO: 56 - protein, 566 aa, Influenza A virus
MKAILVVLLYTFATANADTLCIGYHANNSTDTVDTVLEKNVTVTHSVNLLEDKHNGKLCKLRGVAPLHLGKCNIAGWILGNPECESLSTASSWSYIVETSSSDNGTCYPGDFIDYEELREQLSSVSSFERFEIFPKTSSWPNHDSNKGVTAACPHAGAKSFYKNLIWLVKKGNSYPKLSKSYINDKGKEVLVLWGIHHPSTSADQQSLYQNADAYVFVGTSRYSKKFKPEIAIRPKVRDQEGRMNYYWTLVEPGDKITFEATGNLVVPRYAFAMERNAGSGIIISDTPVHDCNTTCQTPKGAINTSLPFQNIHPITIGKCPKYVKSTKLRLATGLRNVPSIQSRGLFGAIAGFIEGGWTGMVDGWYGYHHQNEQGSGYAADLKSTQNAIDEITNKVNSVIEKMNTQFTAVGKEFNHLEKRIENLNKKVDDGFLDIWTYNAELLVLLENERTLDYHDSNVKNLYEKVRSQLKNNAKEIGNGCFEFYHKCDNTCMESVKNGTYDYPKYSEEAKLNREEIDGVKLESTRIYQILAIYSTVASSLVLVVSLGAISFWMCSNGSLQCRICI

SEQ ID NO: 57 - protein, 566 aa, Influenza A virus
  MISC_FEATURE (14)..(14): Xaa = unknown
MEAILVVLLYTFAXANADTLCIGYHANNSTDTVDTVLEKNVTVTHSVNLLEDKHNGKLCKLRGVAPLHLGKCNIAGWILGNPECESLSTASSWSYIVETSSSDNGTCYPGDFIDYEELREQLSSVSSFERFEIFPKTSSWPNHDSNKGVTAACPHAGAKSFYKNLIWLVKKGNSYPKLSKSYINDKGKEVLVLWGIHHPSTSADQQSLYQNADAYVFVGSSRYSKKFKPEIAIRPKVRDQEGRMNYYWTLVEPGDKITFEATGNLVVPRYAFAMERNAGSGIIISDTPVHDCNTTCQTPKGAINTSLPFHNIHPITIGKCPKYVKSTKLRLATGLRNVPSIQSRGLFGAIAGFIEGGWTGMVDGWYGYHHQNEQGSGYAADLKSTQNAIDEITNKVNSVIEKMNTQFTAVGKEFNHLEKRIENLNKKVDDGFLDIWTYNAELLVLLENERTLDYHDSNVKNLYEKVRSQLKNNAKEIGNGCFEFYHKCDNTCMESVKNGTYDYPKYSEEAKLNREEIDGVKLESTRIYQILAIYSTVASSLVLVVSLGAISFWMCSNGSLQCRICI

SEQ ID NO: 58 - protein, 562 aa, Influenza A virus
MKAILVVLLYTFATANADTLCIGYHANNSTDTVDTVLEKNVTVTHSVNLLEDKHNGKLCKLRGVAPLHLGKCNIAGWILGNPECESLSTASSWSYIVETSSSDNGTCYPGDFIDYEELREQLSSVSSFERFEIFPKTSSWPNHDTNKGVTAACPHAGAKSFYKNLIWLVKKGNSYPKLSKSYINDKGKEVLVLWGIHHPSTSADQQSLYQNADAYVFVGSSRYSKKFKPEIAIRPKVRDQEGRMNYYWTLVEPGDKITFEATGNLVVPRYAFAMERNAGSGIIISDTPVHDCNTTCQTPKGAINTSLPFQNIHPITIGKCPKYVKSTKLRLATGLRNVPSIQSRGLFGAIAGFIEGGWTGMVDGWYGYHHQNEQGSGYAADLKSTQNAIDEITNKVNSVIEKMNTQFTAVGKEFNHLEKRIENLNKKVDDGFLDIWTYNAELLVLLENERTLDYHDSNVKNLYEKVRSQLKNNAKEIGNGCFEFYHKCDNTCMESVKNGTYDYPKYSEEAKLNREEIDGVKLESTRIYQILAIYSTVASSLVLVVSLGAISFWMCSNGSLQC

SEQ ID NO: 59 - protein, 566 aa, Influenza A virus
MKAILVVLLYTFATANADTLCIGYHANNSTDTVDTVLEKNVTVTHSVNLLEDKHNGKLCKLRGVAPLHLGKCNIAGWILGNPECESLSTASSWSYIVETSSSDNGTCYPGDFIDYEELREQLSSVSSFERFEIFPKTSSWPNHDSNKGVTAACPHAGAKSFYKNLIWLVKKGNSYPKLSKSYINDKGKEVLVLWGIHHPSTSADQQSLYQNADAYVFVGSSRYSKKFKPEIAIRPKVRDQEGRMNYYWTLVEPGDKITFEATGNLMVPRYAFAMERNAGSGIIISDTPVHDCNTTCQTPKGAINTSLPFHNIHPITIGKCPKYVKSTKLRLATGLRNVPSIQSRGLFGAIAGFIEGGWTGMVDGWYGYHHQNEQGSGYAADLKSTQNAIDEITNKVNSVIEKMNTQFTAVGKEFNHLEKRIENLNKKVDDGFLDIWTYNAELLVLLENERTLDYHDSNVKNLYEKVRSQLKNNAKEIGNGCFEFYHKCDNTCMESVKNGTYDYPKYSEEAKLNREEIDGVKLESTRIYQILAIYSTVASSLVLVVSLGAISFWMCSNGSLQCRICI

SEQ ID NO: 60 - protein, 566 aa, Influenza A virus
MKAILVVLLYTFATANADTLCIGYHANNSTDTVDTVLEKNVTVTHSVNLLEDKHNGKLCKLRGVAPLHLGKCNIASWILGNPECESLSTASSWSYIVETSSSDNGTCYPGDFIDYEELREQLSSVSSFERFEIFPKTSSWPNHDSNKGVTAACPHAGAKSFYKNLIWLVKKGNSYPKLSKSYINDKGKEVLVLWGIHHPSTSADQQSLYQNADAYVFVGTSRYSKKFKPEIAIRPKVRDQEGRMNYYWTLVEPGDKITFEATGNLVVPRYAFAMERNAGSGIIISDTPVHDCNTTCQTPKGAINTSLPFQNIHPITIGKCPKYVKSTKLRLATGLRNVPSIQSRGLFGAIAGFIEGGWTGMVDGWYGYHHQNEQGSGYAADLKSTQNAIDEITNKVNSVIEKMNTQFTAVGKEFNHLEKRIENLNKKVDDGFLDIWTYNAELLVLLENERTLDYHDSNVKNLYEKVRSQLKNNAKEIGNGCFEFYHKCDNTCMESVKNGTYDYPKYSEEAKLNREEIDGVKLESTRIYQILAIYSTVASSLVLVVSLGAISFWMCSNGSLQCRICI

SEQ ID NO: 61 - protein, 566 aa, Influenza A virus
MKAILVVLLYTFATANADTLCIGYHANNSTDTVDTVLEKNVTVTHSVNLLEDKHNGKLCKLRGVAPLHLGKCNIAGWILGNPECESLSTASSWSYIVETSSSDNGTCYPGDFIDYEELREQLSSVSSFERFEIFPKTSSWPNHDSNKGVTAACPHAGAKSFYKNLIWLVKKGNSYPKLSKSYINDKGKEVLVLWGIHHPSTSADQQSLYQNADAYVFVGSSRYSKKFKPEIAIRPKVRDQEGRMNYYWTLVEPGDKITFEATGNLVVPRYAFAMERNAGSGIIISDTPVHDCNTTCQTPKGAINTSLPFQNIHPITIGKCPKYVKSTKLRLATGLRNVPSIQSRGLFGAIAGFIEGGWTGMVDGWYGYHHQNEQGSGYAADLKSTQNAIDEITNKVNSVIEKMNTQFTAVGKEFNHLEKRIENLNKKVDDGFLDIWTYNAELLVLLENERTLDYHDSNVKNLYEKVRSQLKNNAKEIGNGCFEFYHKCDNTCMESVKNGTYDYPKYSEEAKLNREEIDGVKLESTRIYQILAIYSTVASSLVLVVSLGAISFWMCSNGSLQCRICI

SEQ ID NO: 62 - protein, 566 aa, Influenza A virus
MKAILVVLLYTFATANADTLCIGYHANNSTDTVDTVLEKNVTVTHSVNLLEDKHNGKLCKLRGVAPLHLGKCNIAGWILGNPECESLSTASSWSYIVETPSSDNGTCYPGDFIDYEELREQLSSVSSFERFEIFPKTSSWPNHDSNKGVTAACPHAGAKSFYKNLIWLVKKGNSYPKLSKSYINDKGKEVLVLWGIHHPSTSADQQSLYQNADTYVFVGSSRYSKKFKPEIAIRPKVRDQEGRMNYYWTLVEPGDKITFEATGNLVVPRYAFAMERNAGSGIIISDTPVHDCNTTCQTPKGAINTSLPFQNIHPITIGKCPKYVKSTKLRLATGLRNIPSIQSRGLFGAIAGFIEGGWTGMVDGWYGYHHQNEQGSGYAADLKSTQNAIDEITNKVNSVIEKMNTQFTAVGKEFNHLEKRIENLNKKVDDGFLDIWTYNAELLVLLENERTLDYHDSNVKNLYEKVRSQLKNNAKEIGNGCFEFYHKCDNTCMESVKNGTYDYPKYSEEAKLNREEIDGVKLESTRIYQILAIYSTVASSLVLVVSLGAISFWMCSNGSLQCRICI

SEQ ID NO: 63 - DNA, 6120 bp, Influenza A virus
tcgcgcgtttcggtgatgacggtgaaaacctctgacacatgcagctcccggagacggtcacagcttgtctgtaagcggatgccgggagcagacaagcccgtcagggcgcgtcagcgggtgttggcgggtgtcggggctggcttaactatgcggcatcagagcagattgtactgagagtgcaccatatgcggtgtgaaataccgcacagatgcgtaaggagaaaataccgcatcagattggctattggccattgcatacgttgtatccatatcataatatgtacatttatattggctcatgtccaacattaccgccatgttgacattgattattgactagttattaatagtaatcaattacggggtcattagttcatagcccatatatggagttccgcgttacataacttacggtaaatggcccgcctggctgaccgcccaacgacccccgcccattgacgtcaataatgacgtatgttcccatagtaacgccaatagggactttccattgacgtcaatgggtggagtatttacggtaaactgcccacttggcagtacatcaagtgtatcatatgccaagtacgccccctattgacgtcaatgacggtaaatggcccgcctggcattatgcccagtacatgaccttatgggactttcctacttggcagtacatctacgtattagtcatcgctattaccatggtgatgcggttttggcagtacatcaatgggcgtggatagcggtttgactcacggggatttccaagtctccaccccattgacgtcaatgggagtttgttttggcaccaaaatcaacgggactttccaaaatgtcgtaacaactccgccccattgacgcaaatgggcggtaggcgtgtacggtgggaggtctatataagcagagctcgtttagtgaaccgtcagatcgcctggagacgccatccacgctgttttgacctccatagaagacaccgggaccgatccagcctccatcggctcgcatctctccttcacgcgcccgccgccctacctgaggccgccatccacgccggttgagtcgcgttctgccgcctcccgcctgtggtgcctcctgaactgcgtccgccgtctaggtaagtttaaagctcaggtcgagaccgggcctttgtccggcgctcccttggagcctacctagactcagccggctctccacgctttgcctgaccctgcttgctcaactctagttaacggtggagggcagtgtagtctgagcagtactcgttgctgccgcgcgcgccaccagacataatagctgacagactaacagactgttcctttccatgggtcttttctgcagtcaccgtcgtcgacacgtgtgatcagatatcgcggccgctctagagatatcgccaccatgaaggctattttggtcgtgctcctgtacacctttgccacagccaatgccgataccctttgtattggctaccatgcaaacaactctaccgatacggtcgacacggtgctcgaaaagaatgttactgtcacccactctgtgaacttgctggaggataaacacaatggcaagctctgcaaactgcgaggggtggctcccctgcatctgggaaaatgtaatattgccggctggatactgggtaatccagaatgcgaatccttgagtacggcatccagttggtcctatatcgtcgagaccccgtcaagtgacaatgggacctgctacccaggcgacttcattgattatgaagagctgagggagcagttgtcatccgtaagcagcttcgaaaggtttgagattttcccgaaaactagctcctggcccaatcatgactctaacaaaggagttactgcagcctgtcctcatgcgggcgcgaaaagcttctacaagaacctgatatggctcgtgaagaaaggcaattcatacccaaaactgtctaagagctacataaacgataaagggaaagaggttctggtgctttggggcatacaccacccatctacctcagccgaccagcagtctctgtatcagaacgccgacacatacgtgtttgtgggcagctcccgctattctaagaagttcaaacccgagatcgccatcagaccaaaggtgagagaccaggaaggaaggatgaattattactggaccttggtcgaacctggcgataagataacgtttgaggctacgggcaacctggtcgtgccgagatatgcttttgccatggagaggaatgcggggagcggaattatcatcagcgacactccagttcatgactgtaataccacatgtcagacaccgaagggcgccatcaacacgagcttgccctttcagaatatacatccaatcacaatcggaaaatgccccaagtacgtgaaaagcactaaactgagactcgccaccggactcaggaatatcccaagcatccagtcacggggtctgttcggcgctatcgccggatttattgaaggcggctggacggggatggtggacggttggtacggctaccatcatcaaaatgagcagggctccggatacgccgctgacctgaaatctacgcagaatgccatagatgagatcacaaacaaggtcaatagtgtgatagaaaaaatgaatactcagttcacagctgttggaaaggagtttaaccacctcgagaagcgaattgagaacctgaacaagaaggtggacgatggctttttggatatctggacgtataacgctgagctgcttgttctgctggagaacgaaagaacccttgactaccacgattccaacgtgaagaatctgtatgagaaagtgcgaagccagttgaaaaacaacgcaaaagaaataggcaacggctgtttcgagttctaccacaaatgcgataacacctgcatggagagtgtgaagaacggaacgtacgattatccaaaatactccgaggaggccaaactcaatagggaggagatagacggtgttaagctggagtccacacgcatctatcagattctggcgatctactctactgtggcttccagcctggtgctggtcgtttcccttggggcgatcagcttctggatgtgcagcaatggctccctgcaatgccgcatctgcatctgataggatccagatctgctgtgccttctagttgccagccatctgttgtttgcccctcccccgtgccttccttgaccctggaaggtgccactcccactgtcctttcctaataaaatgaggaaattgcatcgcattgtctgagtaggtgtcattctattctggggggtggggtggggcaggacagcaagggggaggattgggaagacaatagcaggcatgctggggatgcggtgggctctatgggtacccaggtgctgaagaattgacccggttcctcctgggccagaaagaagcaggcacatccccttctctgtgacacaccctgtccacgcccctggttcttagttccagccccactcataggacactcatagctcaggagggctccgccttcaatcccacccgctaaagtacttggagcggtctctccctccctcatcagcccaccaaaccaaacctagcctccaagagtgggaagaaattaaagcaagataggctattaagtgcagagggagagaaaatgcctccaacatgtgaggaagtaatgagagaaatcatagaattttaaggccatgatttaaggccatcatggccttaatcttccgcttcctcgctcactgactcgctgcgctcggtcgttcggctgcggcgagcggtatcagctcactcaaaggcggtaatacggttatccacagaatcaggggataacgcaggaaagaacatgtgagcaaaaggccagcaaaaggccaggaaccgtaaaaaggccgcgttgctggcgtttttccataggctccgcccccctgacgagcatcacaaaaatcgacgctcaagtcagaggtggcgaaacccgacaggactataaagataccaggcgtttccccctggaagctccctcgtgcgctctcctgttccgaccctgccgcttaccggatacctgtccgcctttctcccttcgggaagcgtggcgctttctcatagctcacgctgtaggtatctcagttcggtgtaggtcgttcgctccaagctgggctgtgtgcacgaaccccccgttcagcccgaccgctgcgccttatccggtaactatcgtcttgagtccaacccggtaagacacgacttatcgccactggcagcagccactggtaacaggattagcagagcgaggtatgtaggcggtgctacagagttcttgaagtggtggcctaactacggctacactagaagaacagtatttggtatctgcgctctgctgaagccagttaccttcggaaaaagagttggtagctcttgatccggcaaacaaaccaccgctggtagcggtggtttttttgtttgcaagcagcagattacgcgcagaaaaaaaggatctcaagaagatcctttgatcttttctacggggtctgacgctcagtggaacgaaaactcacgttaagggattttggtcatgagattatcaaaaaggatcttcacctagatccttttaaattaaaaatgaagttttaaatcaatctaaagtatatatgagtaaacttggtctgacagttaccaatgcttaatcagtgaggcacctatctcagcgatctgtctatttcgttcatccatagttgcctgactcggggggggggggcgctgaggtctgcctcgtgaagaaggtgttgctgactcataccaggcctgaatcgccccatcatccagccagaaagtgagggagccacggttgatgagagctttgttgtaggtggaccagttggtgattttgaacttttgctttgccacggaacggtctgcgttgtcgggaagatgcgtgatctgatccttcaactcagcaaaagttcgatttattcaacaaagccgccgtcccgtcaagtcagcgtaatgctctgccagtgttacaaccaattaaccaattctgattagaaaaactcatcgagcatcaaatgaaactgcaatttattcatatcaggattatcaataccatatttttgaaaaagccgtttctgtaatgaaggagaaaactcaccgaggcagttccataggatggcaagatcctggtatcggtctgcgattccgactcgtccaacatcaatacaacctattaatttcccctcgtcaaaaataaggttatcaagtgagaaatcaccatgagtgacgactgaatccggtgagaatggcaaaagcttatgcatttctttccagacttgttcaacaggccagccattacgctcgtcatcaaaatcactcgcatcaaccaaaccgttattcattcgtgattgcgcctgagcgagacgaaatacgcgatcgctgttaaaaggacaattacaaacaggaatcgaatgcaaccggcgcaggaacactgccagcgcatcaacaatattttcacctgaatcaggatattcttctaatacctggaatgctgttttcccggggatcgcagtggtgagtaaccatgcatcatcaggagtacggataaaatgcttgatggtcggaagaggcataaattccgtcagccagtttagtctgaccatctcatctgtaacatcattggcaacgctacctttgccatgtttcagaaacaactctggcgcatcgggcttcccatacaatcgatagattgtcgcacctgattgcccgacattatcgcgagcccatttatacccatataaatcagcatccatgttggaatttaatcgcggcctcgagcaagacgtttcccgttgaatatggctcataacaccccttgtattactgtttatgtaagcagacagttttattgttcatgatgatatatttttatcttgtgcaatgtaacatcagagattttgagacacaacgtggctttccccccccccccattattgaagcatttatcagggttattgtctcatgagcggatacatatttgaatgtatttagaaaaataaacaaataggggttccgcgcacatttccccgaaaagtgccacctgacgtctaagaaaccattattatcatgacattaacctataaaaataggcgtatcacgaggccctttcgtc

SEQ ID NO: 64 - DNA, 1701 bp, Influenza A virus
atgaaggctattttggtcgtgctcctgtacacctttgccacagccaatgccgataccctttgtattggctaccatgcaaacaactctaccgatacggtcgacacggtgctcgaaaagaatgttactgtcacccactctgtgaacttgctggaggataaacacaatggcaagctctgcaaactgcgaggggtggctcccctgcatctgggaaaatgtaatattgccggctggatactgggtaatccagaatgcgaatccttgagtacggcatccagttggtcctatatcgtcgagaccccgtcaagtgacaatgggacctgctacccaggcgacttcattgattatgaagagctgagggagcagttgtcatccgtaagcagcttcgaaaggtttgagattttcccgaaaactagctcctggcccaatcatgactctaacaaaggagttactgcagcctgtcctcatgcgggcgcgaaaagcttctacaagaacctgatatggctcgtgaagaaaggcaattcatacccaaaactgtctaagagctacataaacgataaagggaaagaggttctggtgctttggggcatacaccacccatctacctcagccgaccagcagtctctgtatcagaacgccgacacatacgtgtttgtgggcagctcccgctattctaagaagttcaaacccgagatcgccatcagaccaaaggtgagagaccaggaaggaaggatgaattattactggaccttggtcgaacctggcgataagataacgtttgaggctacgggcaacctggtcgtgccgagatatgcttttgccatggagaggaatgcggggagcggaattatcatcagcgacactccagttcatgactgtaataccacatgtcagacaccgaagggcgccatcaacacgagcttgccctttcagaatatacatccaatcacaatcggaaaatgccccaagtacgtgaaaagcactaaactgagactcgccaccggactcaggaatatcccaagcatccagtcacggggtctgttcggcgctatcgccggatttattgaaggcggctggacggggatggtggacggttggtacggctaccatcatcaaaatgagcagggctccggatacgccgctgacctgaaatctacgcagaatgccatagatgagatcacaaacaaggtcaatagtgtgatagaaaaaatgaatactcagttcacagctgttggaaaggagtttaaccacctcgagaagcgaattgagaacctgaacaagaaggtggacgatggctttttggatatctggacgtataacgctgagctgcttgttctgctggagaacgaaagaacccttgactaccacgattccaacgtgaagaatctgtatgagaaagtgcgaagccagttgaaaaacaacgcaaaagaaataggcaacggctgtttcgagttctaccacaaatgcgataacacctgcatggagagtgtgaagaacggaacgtacgattatccaaaatactccgaggaggccaaactcaatagggaggagatagacggtgttaagctggagtccacacgcatctatcagattctggcgatctactctactgtggcttccagcctggtgctggtcgtttcccttggggcgatcagcttctggatgtgcagcaatggctccctgcaatgccgcatctgcatctga

SEQ ID NO: 65 - protein, 566 aa, Influenza A virus; identical to SEQ ID NO: 62

SEQ ID NO: 66 - DNA, 1701 bp, Influenza A virus
tcagatgcagatgcggcattgcagggagccattgctgcacatccagaagctgatcgccccaagggaaacgaccagcaccaggctggaagccacagtagagtagatcgccagaatctgatagatgcgtgtggactccagcttaacaccgtctatctcctccctattgagtttggcctcctcggagtattttggataatcgtacgttccgttcttcacactctccatgcaggtgttatcgcatttgtggtagaactcgaaacagccgttgcctatttcttttgcgttgtttttcaactggcttcgcactttctcatacagattcttcacgttggaatcgtggtagtcaagggttctttcgttctccagcagaacaagcagctcagcgttatacgtccagatatccaaaaagccatcgtccaccttcttgttcaggttctcaattcgcttctcgaggtggttaaactcctttccaacagctgtgaactgagtattcattttttctatcacactattgaccttgtttgtgatctcatctatggcattctgcgtagatttcaggtcagcggcgtatccggagccctgctcattttgatgatggtagccgtaccaaccgtccaccatccccgtccagccgccttcaataaatccggcgatagcgccgaacagaccccgtgactggatgcttgggatattcctgagtccggtggcgagtctcagtttagtgcttttcacgtacttggggcattttccgattgtgattggatgtatattctgaaagggcaagctcgtgttgatggcgcccttcggtgtctgacatgtggtattacagtcatgaactggagtgtcgctgatgataattccgctccccgcattcctctccatggcaaaagcatatctcggcacgaccaggttgcccgtagcctcaaacgttatcttatcgccaggttcgaccaaggtccagtaataattcatccttccttcctggtctctcacctttggtctgatggcgatctcgggtttgaacttcttagaatagcgggagctgcccacaaacacgtatgtgtcggcgttctgatacagagactgctggtcggctgaggtagatgggtggtgtatgccccaaagcaccagaacctctttccctttatcgtttatgtagctcttagacagttttgggtatgaattgcctttcttcacgagccatatcaggttcttgtagaagcttttcgcgcccgcatgaggacaggctgcagtaactcctttgttagagtcatgattgggccaggagctagttttcgggaaaatctcaaacctttcgaagctgcttacggatgacaactgctccctcagctcttcataatcaatgaagtcgcctgggtagcaggtcccattgtcacttgacggggtctcgacgatataggaccaactggatgccgtactcaaggattcgcattctggattacccagtatccagccggcaatattacattttcccagatgcaggggagccacccctcgcagtttgcagagcttgccattgtgtttatcctccagcaagttcacagagtgggtgacagtaacattcttttcgagcaccgtgtcgaccgtatcggtagagttgtttgcatggtagccaatacaaagggtatcggcattggctgtggcaaaggtgtacaggagcacgaccaaaatagccttcat

SEQ ID NO: 67 - DNA, 6128 bp, Influenza A virus
tcgcgcgtttcggtgatgacggtgaaaacctctgacacatgcagctcccggagacggtcacagcttgtctgtaagcggatgccgggagcagacaagcccgtcagggcgcgtcagcgggtgttggcgggtgtcggggctggcttaactatgcggcatcagagcagattgtactgagagtgcaccatatgcggtgtgaaataccgcacagatgcgtaaggagaaaataccgcatcagattggctattggccattgcatacgttgtatccatatcataatatgtacatttatattggctcatgtccaacattaccgccatgttgacattgattattgactagttattaatagtaatcaattacggggtcattagttcatagcccatatatggagttccgcgttacataacttacggtaaatggcccgcctggctgaccgcccaacgacccccgcccattgacgtcaataatgacgtatgttcccatagtaacgccaatagggactttccattgacgtcaatgggtggagtatttacggtaaactgcccacttggcagtacatcaagtgtatcatatgccaagtacgccccctattgacgtcaatgacggtaaatggcccgcctggcattatgcccagtacatgaccttatgggactttcctacttggcagtacatctacgtattagtcatcgctattaccatggtgatgcggttttggcagtacatcaatgggcgtggatagcggtttgactcacggggatttccaagtctccaccccattgacgtcaatgggagtttgttttggcaccaaaatcaacgggactttccaaaatgtcgtaacaactccgccccattgacgcaaatgggcggtaggcgtgtacggtgggaggtctatataagcagagctcgtttagtgaaccgtcagatcgcctggagacgccatccacgctgttttgacctccatagaagacaccgggaccgatccagcctccatcggctcgcatctctccttcacgcgcccgccgccctacctgaggccgccatccacgccggttgagtcgcgttctgccgcctcccgcctgtggtgcctcctgaactgcgtccgccgtctaggtaagtttaaagctcaggtcgagaccgggcctttgtccggcgctcccttggagcctacctagactcagccggctctccacgctttgcctgaccctgcttgctcaactctagttaacggtggagggcagtgtagtctgagcagtactcgttgctgccgcgcgcgccaccagacataatagctgacagactaacagactgttcctttccatgggtcttttctgcagtcaccgtcgtcgacacgtgtgatcagatatcgcggccgctctagagatatcgccaccatgaaggcaatactagtagttctgctatatacatttgcaaccgcaaatgcagacacattatgtataggttatcatgcgaacaattcaacagacactgtagacacagtactagaaaagaatgtaacagtaacacactctgttaaccttctagaagacaagcataacgggaaactatgcaaactaagaggggtagccccattgcatttgggtaaatgtaacattgctggctggatcctgggaaatccagagtgtgaatcactctccacagcaagctcatggtcctacattgtggaaacatctagttcagacaatggaacgtgttacccaggagatttcatcgattatgaggagctaagagagcaattgagctcagtgtcatcatttgaaaggtttgagatattccccaagacaagttcatggcccaatcatgactcgaacaaaggtgtaacggcagcatgtcctcatgctggagcaaaaagcttctacaaaaatttaatatggctagttaaaaaaggaaattcatacccaaagctcaacaaatcctacattaatgataaagggaaagaagtcctcgtgctatggggcattcaccatccatctactagtgctgaccaacaaagtctctatcagaatgcagatgcatatgtttttgtggggacatcaagatacagcaagaagttcaagccggaaatagcaataagacccaaagtgagggatcaagaagggagaatgaactattactggacactagtagagccgggagacaaaataacattcgaagcaactggaaatctagtggtaccgagatatgcattcgcaatggaaagaaatgctggatctggtattatcatttcagatacaccagtccacgattgcaatacaacttgtcagacacccaagggtgctataaacaccagcctcccatttcagaatatacatccgatcacaattggaaaatgtccaaaatatgtaaaaagcacaaaattgagactggccacaggattgaggaatgtcccgtctattcaatctagaggcctatttggggccattgccggtttcattgaaggggggtggacagggatggtagatggatggtacggttatcaccatcaaaatgagcaggggtcaggatatgcagccgacctgaagagcacacagaatgccattgacgagattactaacaaagtaaattctgttattgaaaagatgaatacacagttcacagcagtaggtaaagagttcaaccacctggaaaaaagaatagagaatttaaataaaaaggttgatgatggtttcctggacatttggacttacaatgccgaactgttggttctattggaaaatgaaagaactttggactaccacgattcaaatgtgaagaacttatatgaaaaggtaagaagccagttaaaaaacaatgccaaggaaattggaaacggctgctttgaattttaccacaaatgcgataacacgtgcatggaaagtgtcaaaaatgggacttatgactacccaaaatactcagaggaagcaaaattaaacagagaagaaatagatggggtaaagctggaatcaacaaggatttaccagattttggcgatctattcaactgtcgccagttcattggtactggtagtctccctgggggcaatcagtttctggatgtgctctaatgggtctctacagtgtagaatatgtatttgatgaacacgtgggatccagatctgctgtgccttctagttgccagccatctgttgtttgcccctcccccgtgccttccttgaccctggaaggtgccactcccactgtcctttcctaataaaatgaggaaattgcatcgcattgtctgagtaggtgtcattctattctggggggtggggtggggcaggacagcaagggggaggattgggaagacaatagcaggcatgctggggatgcggtgggctctatgggtacccaggtgctgaagaattgacccggttcctcctgggccagaaagaagcaggcacatccccttctctgtgacacaccctgtccacgcccctggttcttagttccagccccactcataggacactcatagctcaggagggctccgccttcaatcccacccgctaaagtacttggagcggtctctccctccctcatcagcccaccaaaccaaacctagcctccaagagtgggaagaaattaaagcaagataggctattaagtgcagagggagagaaaatgcctccaacatgtgaggaagtaatgagagaaatcatagaattttaaggccatgatttaaggccatcatggccttaatcttccgcttcctcgctcactgactcgctgcgctcggtcgttcggctgcggcgagcggtatcagctcactcaaaggcggtaatacggttatccacagaatcaggggataacgcaggaaagaacatgtgagcaaaaggccagcaaaaggccaggaaccgtaaaaaggccgcgttgctggcgtttttccataggctccgcccccctgacgagcatcacaaaaatcgacgctcaagtcagaggtggcgaaacccgacaggactataaagataccaggcgtttccccctggaagctccctcgtgcgctctcctgttccgaccctgccgcttaccggatacctgtccgcctttctcccttcgggaagcgtggcgctttctcatagctcacgctgtaggtatctcagttcggtgtaggtcgttcgctccaagctgggctgtgtgcacgaaccccccgttcagcccgaccgctgcgccttatccggtaactatcgtcttgagtccaacccggtaagacacgacttatcgccactggcagcagccactggtaacaggattagcagagcgaggtatgtaggcggtgctacagagttcttgaagtggtggcctaactacggctacactagaagaacagtatttggtatctgcgctctgctgaagccagttaccttcggaaaaagagttggtagctcttgatccggcaaacaaaccaccgctggtagcggtggtttttttgtttgcaagcagcagattacgcgcagaaaaaaaggatctcaagaagatcctttgatcttttctacggggtctgacgctcagtggaacgaaaactcacgttaagggattttggtcatgagattatcaaaaaggatcttcacctagatccttttaaattaaaaatgaagttttaaatcaatctaaagtatatatgagtaaacttggtctgacagttaccaatgcttaatcagtgaggcacctatctcagcgatctgtctatttcgttcatccatagttgcctgactcggggggggggggcgctgaggtctgcctcgtgaagaaggtgttgctgactcataccaggcctgaatcgccccatcatccagccagaaagtgagggagccacggttgatgagagctttgttgtaggtggaccagttggtgattttgaacttttgctttgccacggaacggtctgcgttgtcgggaagatgcgtgatctgatccttcaactcagcaaaagttcgatttattcaacaaagccgccgtcccgtcaagtcagcgtaatgctctgccagtgttacaaccaattaaccaattctgattagaaaaactcatcgagcatcaaatgaaactgcaatttattcatatcaggattatcaataccatatttttgaaaaagccgtttctgtaatgaaggagaaaactcaccgaggcagttccataggatggcaagatcctggtatcggtctgcgattccgactcgtccaacatcaatacaacctattaatttcccctcgtcaaaaataaggttatcaagtgagaaatcaccatgagtgacgactgaatccggtgagaatggcaaaagcttatgcatttctttccagacttgttcaacaggccagccattacgctcgtcatcaaaatcactcgcatcaaccaaaccgttattcattcgtgattgcgcctgagcgagacgaaatacgcgatcgctgttaaaaggacaattacaaacaggaatcgaatgcaaccggcgcaggaacactgccagcgcatcaacaatattttcacctgaatcaggatattcttctaatacctggaatgctgttttcccggggatcgcagtggtgagtaaccatgcatcatcaggagtacggataaaatgcttgatggtcggaagaggcataaattccgtcagccagtttagtctgaccatctcatctgtaacatcattggcaacgctacctttgccatgtttcagaaacaactctggcgcatcgggcttcccatacaatcgatagattgtcgcacctgattgcccgacattatcgcgagcccatttatacccatataaatcagcatccatgttggaatttaatcgcggcctcgagcaagacgtttcccgttgaatatggctcataacaccccttgtattactgtttatgtaagcagacagttttattgttcatgatgatatatttttatcttgtgcaatgtaacatcagagattttgagacacaacgtggctttccccccccccccattattgaagcatttatcagggttattgtctcatgagcggatacatatttgaatgtatttagaaaaataaacaaataggggttccgcgcacatttccccgaaaagtgccacctgacgtctaagaaaccattattatcatgacattaacctataaaaataggcgtatcacgaggccctttcgtc

SEQ ID NO: 68 - DNA, 1701 bp, Influenza A virus
atgaaggcaatactagtagttctgctatatacatttgcaaccgcaaatgcagacacattatgtataggttatcatgcgaacaattcaacagacactgtagacacagtactagaaaagaatgtaacagtaacacactctgttaaccttctagaagacaagcataacgggaaactatgcaaactaagaggggtagccccattgcatttgggtaaatgtaacattgctggctggatcctgggaaatccagagtgtgaatcactctccacagcaagctcatggtcctacattgtggaaacatctagttcagacaatggaacgtgttacccaggagatttcatcgattatgaggagctaagagagcaattgagctcagtgtcatcatttgaaaggtttgagatattccccaagacaagttcatggcccaatcatgactcgaacaaaggtgtaacggcagcatgtcctcatgctggagcaaaaagcttctacaaaaatttaatatggctagttaaaaaaggaaattcatacccaaagctcaacaaatcctacattaatgataaagggaaagaagtcctcgtgctatggggcattcaccatccatctactagtgctgaccaacaaagtctctatcagaatgcagatgcatatgtttttgtggggacatcaagatacagcaagaagttcaagccggaaatagcaataagacccaaagtgagggatcaagaagggagaatgaactattactggacactagtagagccgggagacaaaataacattcgaagcaactggaaatctagtggtaccgagatatgcattcgcaatggaaagaaatgctggatctggtattatcatttcagatacaccagtccacgattgcaatacaacttgtcagacacccaagggtgctataaacaccagcctcccatttcagaatatacatccgatcacaattggaaaatgtccaaaatatgtaaaaagcacaaaattgagactggccacaggattgaggaatgtcccgtctattcaatctagaggcctatttggggccattgccggtttcattgaaggggggtggacagggatggtagatggatggtacggttatcaccatcaaaatgagcaggggtcaggatatgcagccgacctgaagagcacacagaatgccattgacgagattactaacaaagtaaattctgttattgaaaagatgaatacacagttcacagcagtaggtaaagagttcaaccacctggaaaaaagaatagagaatttaaataaaaaggttgatgatggtttcctggacatttggacttacaatgccgaactgttggttctattggaaaatgaaagaactttggactaccacgattcaaatgtgaagaacttatatgaaaaggtaagaagccagttaaaaaacaatgccaaggaaattggaaacggctgctttgaattttaccacaaatgcgataacacgtgcatggaaagtgtcaaaaatgggacttatgactacccaaaatactcagaggaagcaaaattaaacagagaagaaatagatggggtaaagctggaatcaacaaggatttaccagattttggcgatctattcaactgtcgccagttcattggtactggtagtctccctgggggcaatcagtttctggatgtgctctaatgggtctctacagtgtagaatatgtatttga

SEQ ID NO: 69 - protein, 566 aa, Influenza A virus
MKAILVVLLYTFATANADTLCIGYHANNSTDTVDTVLEKNVTVTHSVNLLEDKHNGKLCKLRGVAPLHLGKCNIAGWILGNPECESLSTASSWSYIVETSSSDNGTCYPGDFIDYEELREQLSSVSSFERFEIFPKTSSWPNHDSNKGVTAACPHAGAKSFYKNLIWLVKKGNSYPKLNKSYINDKGKEVLVLWGIHHPSTSADQQSLYQNADAYVFVGTSRYSKKFKPEIAIRPKVRDQEGRMNYYWTLVEPGDKITFEATGNLVVPRYAFAMERNAGSGIIISDTPVHDCNTTCQTPKGAINTSLPFQNIHPITIGKCPKYVKSTKLRLATGLRNVPSIQSRGLFGAIAGFIEGGWTGMVDGWYGYHHQNEQGSGYAADLKSTQNAIDEITNKVNSVIEKMNTQFTAVGKEFNHLEKRIENLNKKVDDGFLDIWTYNAELLVLLENERTLDYHDSNVKNLYEKVRSQLKNNAKEIGNGCFEFYHKCDNTCMESVKNGTYDYPKYSEEAKLNREEIDGVKLESTRIYQILAIYSTVASSLVLVVSLGAISFWMCSNGSLQCRICI

SEQ ID NO: 70 - DNA, 1701 bp, Influenza A virus
tcaaatacatattctacactgtagagacccattagagcacatccagaaactgattgcccccagggagactaccagtaccaatgaactggcgacagttgaatagatcgccaaaatctggtaaatccttgttgattccagctttaccccatctatttcttctctgtttaattttgcttcctctgagtattttgggtagtcataagtcccatttttgacactttccatgcacgtgttatcgcatttgtggtaaaattcaaagcagccgtttccaatttccttggcattgttttttaactggcttcttaccttttcatataagttcttcacatttgaatcgtggtagtccaaagttctttcattttccaatagaaccaacagttcggcattgtaagtccaaatgtccaggaaaccatcatcaacctttttatttaaattctctattcttttttccaggtggttgaactctttacctactgctgtgaactgtgtattcatcttttcaataacagaatttactttgttagtaatctcgtcaatggcattctgtgtgctcttcaggtcggctgcatatcctgacccctgctcattttgatggtgataaccgtaccatccatctaccatccctgtccaccccccttcaatgaaaccggcaatggccccaaataggcctctagattgaatagacgggacattcctcaatcctgtggccagtctcaattttgtgctttttacatattttggacattttccaattgtgatcggatgtatattctgaaatgggaggctggtgtttatagcacccttgggtgtctgacaagttgtattgcaatcgtggactggtgtatctgaaatgataataccagatccagcatttctttccattgcgaatgcatatctcggtaccactagatttccagttgcttcgaatgttattttgtctcccggctctactagtgtccagtaatagttcattctcccttcttgatccctcactttgggtcttattgctatttccggcttgaacttcttgctgtatcttgatgtccccacaaaaacatatgcatctgcattctgatagagactttgttggtcagcactagtagatggatggtgaatgccccatagcacgaggacttctttccctttatcattaatgtaggatttgttgagctttgggtatgaatttccttttttaactagccatattaaatttttgtagaagctttttgctccagcatgaggacatgctgccgttacacctttgttcgagtcatgattgggccatgaacttgtcttggggaatatctcaaacctttcaaatgatgacactgagctcaattgctctcttagctcctcataatcgatgaaatctcctgggtaacacgttccattgtctgaactagatgtttccacaatgtaggaccatgagcttgctgtggagagtgattcacactctggatttcccaggatccagccagcaatgttacatttacccaaatgcaatggggctacccctcttagtttgcatagtttcccgttatgcttgtcttctagaaggttaacagagtgtgttactgttacattcttttctagtactgtgtctacagtgtctgttgaattgttcgcatgataacctatacataatgtgtctgcatttgcggttgcaaatgtatatagcagaactactagtattgccttcat

SEQ ID NO: 71 - DNA, 6128 bp, Influenza A virus
tcgcgcgtttcggtgatgacggtgaaaacctctgacacatgcagctcccggagacggtcacagcttgtctgtaagcggatgccgggagcagacaagcccgtcagggcgcgtcagcgggtgttggcgggtgtcggggctggcttaactatgcggcatcagagcagattgtactgagagtgcaccatatgcggtgtgaaataccgcacagatgcgtaaggagaaaataccgcatcagattggctattggccattgcatacgttgtatccatatcataatatgtacatttatattggctcatgtccaacattaccgccatgttgacattgattattgactagttattaatagtaatcaattacggggtcattagttcatagcccatatatggagttccgcgttacataacttacggtaaatggcccgcctggctgaccgcccaacgacccccgcccattgacgtcaataatgacgtatgttcccatagtaacgccaatagggactttccattgacgtcaatgggtggagtatttacggtaaactgcccacttggcagtacatcaagtgtatcatatgccaagtacgccccctattgacgtcaatgacggtaaatggcccgcctggcattatgcccagtacatgaccttatgggactttcctacttggcagtacatctacgtattagtcatcgctattaccatggtgatgcggttttggcagtacatcaatgggcgtggatagcggtttgactcacggggatttccaagtctccaccccattgacgtcaatgggagtttgttttggcaccaaaatcaacgggactttccaaaatgtcgtaacaactccgccccattgacgcaaatgggcggtaggcgtgtacggtgggaggtctatataagcagagctcgtttagtgaaccgtcagatcgcctggagacgccatccacgctgttttgacctccatagaagacaccgggaccgatccagcctccatcggctcgcatctctccttcacgcgcccgccgccctacctgaggccgccatccacgccggttgagtcgcgttctgccgcctcccgcctgtggtgcctcctgaactgcgtccgccgtctaggtaagtttaaagctcaggtcgagaccgggcctttgtccggcgctcccttggagcctacctagactcagccggctctccacgctttgcctgaccctgcttgctcaactctagttaacggtggagggcagtgtagtctgagcagtactcgttgctgccgcgcgcgccaccagacataatagctgacagactaacagactgttcctttccatgggtcttttctgcagtcaccgtcgtcgacacgtgtgatcagatatcgcggccgctctagagatatcgccaccatgaaggcaatactagtagttctgctatatacatttgcaaccgcaaatgcagacacattatgtataggttatcatgcgaacaattcaacagacactgtagacacagtactagaaaagaatgtaacagtaacacactctgttaaccttctagaagacaagcataacgggaaactatgcaaactaagaggggtagccccattgcatttgggtaaatgtaacattgctggctggatcctgggaaatccagagtgtgaatcactctccacagcaagctcatggtcctacattgtggaaacatctagttcagacaatggaacgtgttacccaggagatttcatcgattatgaggagctaagagagcaattgagctcagtgtcatcatttgaaaggtttgagatattccccaatacaagttcatggcccaatcatgactcgaacaaaggtgtaacggcagcatgtcctcatgctggagcaaaaagcttctacaaaaatttaatatggctagttaaaaaaggaaattcatacccaaagctcagcaaatcctacattaatgataaagggaaagaagtcctcgtgctatggggcattcaccatccatctactagtgctgaccaacaaagtctctatcagaatgcagatgcatatgtttttgtggggacatcaagatacagcaagaagttcaagccggaaatagcaataagacccaaagtgagggatcaagaagggagaatgaactattactggacactagtagagccgggagacaaaataacattcgaagcaactggaaatctagtggtaccgagatatgcattcgcaatggaaagaaatgctggatctggtattatcatttcagatacaccagtccacgattgcaatacaacttgtcagacacccaagggtgctataaacaccagcctcccatttcagaatatacatccgatcacaattggaaaatgtccaaaatatgtaaaaagcacaaaattgagactggccacaggattgaggaatgtcccgtctattcaatctagaggcctatttggggccattgccggtttcattgaaggggggtggacagggatggtagatggatggtacggttatcaccatcaaaatgagcaggggtcaggatatgcagccgacctgaagagcacacagaatgccattgacgagattactaacaaagtaaattctgttattgaaaagatgaatacacagttcacagcagtaggtaaagagttcaaccacctggaaaaaagaatagagaatttaaataaaaaggttgatgatggtttcctggacatttggacttacaatgccgaactgttggttctattggaaaatgaaagaactttggactaccacgattcaaatgtgaagaacttatatgaaaaggtaagaagccagttaaaaaacaatgccaaggaaattggaaacggctgctttgaattttaccacaaatgcgataacacgtgcatggaaagtgtcaaaaatgggacttatgactacccaaaatactcagaggaagcaaaattaaacagagaagaaatagatggggtaaagctggaatcaacaaggatttaccagattttggcgatctattcaactgtcgccagttcattggtactggtagtctccctgggggcaatcagtttctggatgtgctctaatgggtctctacagtgtagaatatgtatttgatgaacacgtgggatccagatctgctgtgccttctagttgccagccatctgttgtttgcccctcccccgtgccttccttgaccctggaaggtgccactcccactgtcctttcctaataaaatgaggaaattgcatcgcattgtctgagtaggtgtcattctattctggggggtggggtggggcaggacagcaagggggaggattgggaagacaatagcaggcatgctggggatgcggtgggctctatgggtacccaggtgctgaagaattgacccggttcctcctgggccagaaagaagcaggcacatccccttctctgtgacacaccctgtccacgcccctggttcttagttccagccccactcataggacactcatagctcaggagggctccgccttcaatcccacccgctaaagtacttggagcggtctctccctccctcatcagcccaccaaaccaaacctagcctccaagagtgggaagaaattaaagcaagataggctattaagtgcagagggagagaaaatgcctccaacatgtgaggaagtaatgagagaaatcatagaattttaaggccatgatttaaggccatcatggccttaatcttccgcttcctcgctcactgactcgctgcgctcggtcgttcggctgcggcgagcggtatcagctcactcaaaggcggtaatacggttatccacagaatcaggggataacgcaggaaagaacatgtgagcaaaaggccagcaaaaggccaggaaccgtaaaaaggccgcgttgctggcgtttttccataggctccgcccccctgacgagcatcacaaaaatcgacgctcaagtcagaggtggcgaaacccgacaggactataaagataccaggcgtttccccctggaagctccctcgtgcgctctcctgttccgaccctgccgcttaccggatacctgtccgcctttctcccttcgggaagcgtggcgctttctcatagctcacgctgtaggtatctcagttcggtgtaggtcgttcgctccaagctgggctgtgtgcacgaaccccccgttcagcccgaccgctgcgccttatccggtaactatcgtcttgagtccaacccggtaagacacgacttatcgccactggcagcagccactggtaacaggattagcagagcgaggtatgtaggcggtgctacagagttcttgaagtggtggcctaactacggctacactagaagaacagtatttggtatctgcgctctgctgaagccagttaccttcggaaaaagagttggtagctcttgatccggcaaacaaaccaccgctggtagcggtggtttttttgtttgcaagcagcagattacgcgcagaaaaaaaggatctcaagaagatcctttgatcttttctacggggtctgacgctcagtggaacgaaaactcacgttaagggattttggtcatgagattatcaaaaaggatcttcacctagatccttttaaattaaaaatgaagttttaaatcaatctaaagtatatatgagtaaacttggtctgacagttaccaatgcttaatcagtgaggcacctatctcagcgatctgtctatttcgttcatccatagttgcctgactcggggggggggggcgctgaggtctgcctcgtgaagaaggtgttgctgactcataccaggcctgaatcgccccatcatccagccagaaagtgagggagccacggttgatgagagctttgttgtaggtggaccagttggtgattttgaacttttgctttgccacggaacggtctgcgttgtcgggaagatgcgtgatctgatccttcaactcagcaaaagttcgatttattcaacaaagccgccgtcccgtcaagtcagcgtaatgctctgccagtgttacaaccaattaaccaattctgattagaaaaactcatcgagcatcaaatgaaactgcaatttattcatatcaggattatcaataccatatttttgaaaaagccgtttctgtaatgaaggagaaaactcaccgaggcagttccataggatggcaagatcctggtatcggtctgcgattccgactcgtccaacatcaatacaacctattaatttcccctcgtcaaaaataaggttatcaagtgagaaatcaccatgagtgacgactgaatccggtgagaatggcaaaagcttatgcatttctttccagacttgttcaacaggccagccattacgctcgtcatcaaaatcactcgcatcaaccaaaccgttattcattcgtgattgcgcctgagcgagacgaaatacgcgatcgctgttaaaaggacaattacaaacaggaatcgaatgcaaccggcgcaggaacactgccagcgcatcaacaatattttcacctgaatcaggatattcttctaatacctggaatgctgttttcccggggatcgcagtggtgagtaaccatgcatcatcaggagtacggataaaatgcttgatggtcggaagaggcataaattccgtcagccagtttagtctgaccatctcatctgtaacatcattggcaacgctacctttgccatgtttcagaaacaactctggcgcatcgggcttcccatacaatcgatagattgtcgcacctgattgcccgacattatcgcgagcccatttatacccatataaatcagcatccatgttggaatttaatcgcggcctcgagcaagacgtttcccgttgaatatggctcataacaccccttgtattactgtttatgtaagcagacagttttattgttcatgatgatatatttttatcttgtgcaatgtaacatcagagattttgagacacaacgtggctttccccccccccccattattgaagcatttatcagggttattgtctcatgagcggatacatatttgaatgtatttagaaaaataaacaaataggggttccgcgcacatttccccgaaaagtgccacctgacgtctaagaaaccattattatcatgacattaacctataaaaataggcgtatcacgaggccctttcgtc

SEQ ID NO: 72 - DNA, 1701 bp, Influenza A virus
atgaaggcaatactagtagttctgctatatacatttgcaaccgcaaatgcagacacattatgtataggttatcatgcgaacaattcaacagacactgtagacacagtactagaaaagaatgtaacagtaacacactctgttaaccttctagaagacaagcataacgggaaactatgcaaactaagaggggtagccccattgcatttgggtaaatgtaacattgctggctggatcctgggaaatccagagtgtgaatcactctccacagcaagctcatggtcctacattgtggaaacatctagttcagacaatggaacgtgttacccaggagatttcatcgattatgaggagctaagagagcaattgagctcagtgtcatcatttgaaaggtttgagatattccccaatacaagttcatggcccaatcatgactcgaacaaaggtgtaacggcagcatgtcctcatgctggagcaaaaagcttctacaaaaatttaatatggctagttaaaaaaggaaattcatacccaaagctcagcaaatcctacattaatgataaagggaaagaagtcctcgtgctatggggcattcaccatccatctactagtgctgaccaacaaagtctctatcagaatgcagatgcatatgtttttgtggggacatcaagatacagcaagaagttcaagccggaaatagcaataagacccaaagtgagggatcaagaagggagaatgaactattactggacactagtagagccgggagacaaaataacattcgaagcaactggaaatctagtggtaccgagatatgcattcgcaatggaaagaaatgctggatctggtattatcatttcagatacaccagtccacgattgcaatacaacttgtcagacacccaagggtgctataaacaccagcctcccatttcagaatatacatccgatcacaattggaaaatgtccaaaatatgtaaaaagcacaaaattgagactggccacaggattgaggaatgtcccgtctattcaatctagaggcctatttggggccattgccggtttcattgaaggggggtggacagggatggtagatggatggtacggttatcaccatcaaaatgagcaggggtcaggatatgcagccgacctgaagagcacacagaatgccattgacgagattactaacaaagtaaattctgttattgaaaagatgaatacacagttcacagcagtaggtaaagagttcaaccacctggaaaaaagaatagagaatttaaataaaaaggttgatgatggtttcctggacatttggacttacaatgccgaactgttggttctattggaaaatgaaagaactttggactaccacgattcaaatgtgaagaacttatatgaaaaggtaagaagccagttaaaaaacaatgccaaggaaattggaaacggctgctttgaattttaccacaaatgcgataacacgtgcatggaaagtgtcaaaaatgggacttatgactacccaaaatactcagaggaagcaaaattaaacagagaagaaatagatggggtaaagctggaatcaacaaggatttaccagattttggcgatctattcaactgtcgccagttcattggtactggtagtctccctgggggcaatcagtttctggatgtgctctaatgggtctctacagtgtagaatatgtatttga

SEQ ID NO: 73 - protein, 566 aa, Influenza A virus
MKAILVVLLYTFATANADTLCIGYHANNSTDTVDTVLEKNVTVTHSVNLLEDKHNGKLCKLRGVAPLHLGKCNIAGWILGNPECESLSTASSWSYIVETSSSDNGTCYPGDFIDYEELREQLSSVSSFERFEIFPNTSSWPNHDSNKGVTAACPHAGAKSFYKNLIWLVKKGNSYPKLSKSYINDKGKEVLVLWGIHHPSTSADQQSLYQNADAYVFVGTSRYSKKFKPEIAIRPKVRDQEGRMNYYWTLVEPGDKITFEATGNLVVPRYAFAMERNAGSGIIISDTPVHDCNTTCQTPKGAINTSLPFQNIHPITIGKCPKYVKSTKLRLATGLRNVPSIQSRGLFGAIAGFIEGGWTGMVDGWYGYHHQNEQGSGYAADLKSTQNAIDEITNKVNSVIEKMNTQFTAVGKEFNHLEKRIENLNKKVDDGFLDIWTYNAELLVLLENERTLDYHDSNVKNLYEKVRSQLKNNAKEIGNGCFEFYHKCDNTCMESVKNGTYDYPKYSEEAKLNREEIDGVKLESTRIYQILAIYSTVASSLVLVVSLGAISFWMCSNGSLQCRICI

SEQ ID NO: 74 - DNA, 1701 bp, Influenza A virus
tcaaatacatattctacactgtagagacccattagagcacatccagaaactgattgcccccagggagactaccagtaccaatgaactggcgacagttgaatagatcgccaaaatctggtaaatccttgttgattccagctttaccccatctatttcttctctgtttaattttgcttcctctgagtattttgggtagtcataagtcccatttttgacactttccatgcacgtgttatcgcatttgtggtaaaattcaaagcagccgtttccaatttccttggcattgttttttaactggcttcttaccttttcatataagttcttcacatttgaatcgtggtagtccaaagttctttcattttccaatagaaccaacagttcggcattgtaagtccaaatgtccaggaaaccatcatcaacctttttatttaaattctctattcttttttccaggtggttgaactctttacctactgctgtgaactgtgtattcatcttttcaataacagaatttactttgttagtaatctcgtcaatggcattctgtgtgctcttcaggtcggctgcatatcctgacccctgctcattttgatggtgataaccgtaccatccatctaccatccctgtccaccccccttcaatgaaaccggcaatggccccaaataggcctctagattgaatagacgggacattcctcaatcctgtggccagtctcaattttgtgctttttacatattttggacattttccaattgtgatcggatgtatattctgaaatgggaggctggtgtttatagcacccttgggtgtctgacaagttgtattgcaatcgtggactggtgtatctgaaatgataataccagatccagcatttctttccattgcgaatgcatatctcggtaccactagatttccagttgcttcgaatgttattttgtctcccggctctactagtgtccagtaatagttcattctcccttcttgatccctcactttgggtcttattgctatttccggcttgaacttcttgctgtatcttgatgtccccacaaaaacatatgcatctgcattctgatagagactttgttggtcagcactagtagatggatggtgaatgccccatagcacgaggacttctttccctttatcattaatgtaggatttgctgagctttgggtatgaatttccttttttaactagccatattaaatttttgtagaagctttttgctccagcatgaggacatgctgccgttacacctttgttcgagtcatgattgggccatgaacttgtattggggaatatctcaaacctttcaaatgatgacactgagctcaattgctctcttagctcctcataatcgatgaaatctcctgggtaacacgttccattgtctgaactagatgtttccacaatgtaggaccatgagcttgctgtggagagtgattcacactctggatttcccaggatccagccagcaatgttacatttacccaaatgcaatggggctacccctcttagtttgcatagtttcccgttatgcttgtcttctagaaggttaacagagtgtgttactgttacattcttttctagtactgtgtctacagtgtctgttgaattgttcgcatgataacctatacataatgtgtctgcatttgcggttgcaaatgtatatagcagaactactagtattgccttcat

SEQ ID NO: 75 - DNA, 6128 bp, Influenza A virus
tcgcgcgtttcggtgatgacggtgaaaacctctgacacatgcagctcccggagacggtcacagcttgtctgtaagcggatgccgggagcagacaagcccgtcagggcgcgtcagcgggtgttggcgggtgtcggggctggcttaactatgcggcatcagagcagattgtactgagagtgcaccatatgcggtgtgaaataccgcacagatgcgtaaggagaaaataccgcatcagattggctattggccattgcatacgttgtatccatatcataatatgtacatttatattggctcatgtccaacattaccgccatgttgacattgattattgactagttattaatagtaatcaattacggggtcattagttcatagcccatatatggagttccgcgttacataacttacggtaaatggcccgcctggctgaccgcccaacgacccccgcccattgacgtcaataatgacgtatgttcccatagtaacgccaatagggactttccattgacgtcaatgggtggagtatttacggtaaactgcccacttggcagtacatcaagtgtatcatatgccaagtacgccccctattgacgtcaatgacggtaaatggcccgcctggcattatgcccagtacatgaccttatgggactttcctacttggcagtacatctacgtattagtcatcgctattaccatggtgatgcggttttggcagtacatcaatgggcgtggatagcggtttgactcacggggatttccaagtctccaccccattgacgtcaatgggagtttgttttggcaccaaaatcaacgggactttccaaaatgtcgtaacaactccgccccattgacgcaaatgggcggtaggcgtgtacggtgggaggtctatataagcagagctcgtttagtgaaccgtcagatcgcctggagacgccatccacgctgttttgacctccatagaagacaccgggaccgatccagcctccatcggctcgcatctctccttcacgcgcccgccgccctacctgaggccgccatccacgccggttgagtcgcgttctgccgcctcccgcctgtggtgcctcctgaactgcgtccgccgtctaggtaagtttaaagctcaggtcgagaccgggcctttgtccggcgctcccttggagcctacctagactcagccggctctccacgctttgcctgaccctgcttgctcaactctagttaacggtggagggcagtgtagtctgagcagtactcgttgctgccgcgcgcgccaccagacataatagctgacagactaacagactgttcctttccatgggtcttttctgcagtcaccgtcgtcgacacgtgtgatcagatatcgcggccgctctagagatatcgccaccatgaagacaatactagtagttctgctatatacatttgcaaccgcaaatgcagacacattatgtataggttatcatgcgaacaattcaacagacactgtagacacagtactagaaaagaatgtaacagtaacacactctgttaaccttctagaagacaagcataacgggaaactatgcaaactaagaggggtagccccattgcatttgggtaaatgtaacattgctggctggatcctgggaaatccagagtgtgaatcactctccacagcaagctcatggtcctacattgtggaaacatctagttcagacaatggaacgtgttacccaggagatttcatcgattatgaggagctaagagagcaattgagctcagtgtcatcatttgaaaggtttgagatattccccaatacaagttcatggcccaatcatgactcgaacaaaggtgtaacggcagcatgtcctcatgctggagcaaaaagcttctacaaaaatttaatatggctagttaaaaaaggaaattcatacccaaagctcaacaaatcctatattaatgataaagggaaagaagtcctcgtgctatggggcattcaccatccatctactagtgctgaccaacaaagtctctatcagaatgcagatgcatatgtttttgtggggacatcaagatacagcaagaagttcaagccggaaatagcaataagacccaaagtgaggggtcaagaagggagaatgaactattactggacactagtaaagccgggagacaaaataacattcgaagcaactggaaatctagtggtaccgagatatgcattcgcaatggaaagaaatgctggatctggtattatcatttcagatacaccagtccacgattgcaatacaacttgtcagacacccaagggtgctataaacaccagcctcccatttcagaatatacatccgatcacaattggaaaatgtccaaaatatgtaaaaagcacaaaattgagactggccacaggattgaggaatgtcccgtctattcaatctagaggcctatttggggccattgccggtttcattgaaggggggtggacagggatggtagatggatggtacggttatcaccatcaaaatgagcaggggtcaggatatgcagccgacctgaagagcacacagaatgccattgacgagattactaacaaagtaaattctgttattgaaaagatgaatacacagttcacagcagtaggtaaagagttcaaccacctggaaaaaagaatagagaatttaaataaaaaggttgatgatggtttcctggacatttggacttacaatgccgaactgttggttctattggaaaatgaaagaactttggactaccacgattcaaatgtgaagaacttatatgaaaaggtaagaagccagttaaaaaacaatgccaaggaaattggaaacggctgctttgaattttaccacaaatgcgataacacgtgcatggaaagtgtcaaaaatgggacttatgactacccaaaatactcagaggaagcaaaattaaacagagaagaaatagatggggtaaagctggaatcaacaaggatttaccagattttggcgatctattcaactgtcgccagttcattggtactggtagtctccctgggggcaatcagtttctggatgtgctctaatgggtctctacagtgtagaatatgtatttgatgaacacgtgggatccagatctgctgtgccttctagttgccagccatctgttgtttgcccctcccccgtgccttccttgaccctggaaggtgccactcccactgtcctttcctaataaaatgaggaaattgcatcgcattgtctgagtaggtgtcattctattctggggggtggggtggggcaggacagcaagggggaggattgggaagacaatagcaggcatgctggggatgcggtgggctctatgggtacccaggtgctgaagaattgacccggttcctcctgggccagaaagaagcaggcacatccccttctctgtgacacaccctgtccacgcccctggttcttagttccagccccactcataggacactcatagctcaggagggctccgccttcaatcccacccgctaaagtacttggagcggtctctccctccctcatcagcccaccaaaccaaacctagcctccaagagtgggaagaaattaaagcaagataggctattaagtgcagagggagagaaaatgcctccaacatgtgaggaagtaatgagagaaatcatagaattttaaggccatgatttaaggccatcatggccttaatcttccgcttcctcgctcactgactcgctgcgctcggtcgttcggctgcggcgagcggtatcagctcactcaaaggcggtaatacggttatccacagaatcaggggataacgcaggaaagaacatgtgagcaaaaggccagcaaaaggccaggaaccgtaaaaaggccgcgttgctggcgtttttccataggctccgcccccctgacgagcatcacaaaaatcgacgctcaagtcagaggtggcgaaacccgacaggactataaagataccaggcgtttccccctggaagctccctcgtgcgctctcctgttccgaccctgccgcttaccggatacctgtccgcctttctcccttcgggaagcgtggcgctttctcatagctcacgctgtaggtatctcagttcggtgtaggtcgttcgctccaagctgggctgtgtgcacgaaccccccgttcagcccgaccgctgcgccttatccggtaactatcgtcttgagtccaacccggtaagacacgacttatcgccactggcagcagccactggtaacaggattagcagagcgaggtatgtaggcggtgctacagagttcttgaagtggtggcctaactacggctacactagaagaacagtatttggtatctgcgctctgctgaagccagttaccttcggaaaaagagttggtagctcttgatccggcaaacaaaccaccgctggtagcggtggtttttttgtttgcaagcagcagattacgcgcagaaaaaaaggatctcaagaagatcctttgatcttttctacggggtctgacgctcagtggaacgaaaactcacgttaagggattttggtcatgagattatcaaaaaggatcttcacctagatccttttaaattaaaaatgaagttttaaatcaatctaaagtatatatgagtaaacttggtctgacagttaccaatgcttaatcagtgaggcacctatctcagcgatctgtctatttcgttcatccatagttgcctgactcggggggggggggcgctgaggtctgcctcgtgaagaaggtgttgctgactcataccaggcctgaatcgccccatcatccagccagaaagtgagggagccacggttgatgagagctttgttgtaggtggaccagttggtgattttgaacttttgctttgccacggaacggtctgcgttgtcgggaagatgcgtgatctgatccttcaactcagcaaaagttcgatttattcaacaaagccgccgtcccgtcaagtcagcgtaatgctctgccagtgttacaaccaattaaccaattctgattagaaaaactcatcgagcatcaaatgaaactgcaatttattcatatcaggattatcaataccatatttttgaaaaagccgtttctgtaatgaaggagaaaactcaccgaggcagttccataggatggcaagatcctggtatcggtctgcgattccgactcgtccaacatcaatacaacctattaatttcccctcgtcaaaaataaggttatcaagtgagaaatcaccatgagtgacgactgaatccggtgagaatggcaaaagcttatgcatttctttccagacttgttcaacaggccagccattacgctcgtcatcaaaatcactcgcatcaaccaaaccgttattcattcgtgattgcgcctgagcgagacgaaatacgcgatcgctgttaaaaggacaattacaaacaggaatcgaatgcaaccggcgcaggaacactgccagcgcatcaacaatattttcacctgaatcaggatattcttctaatacctggaatgctgttttcccggggatcgcagtggtgagtaaccatgcatcatcaggagtacggataaaatgcttgatggtcggaagaggcataaattccgtcagccagtttagtctgaccatctcatctgtaacatcattggcaacgctacctttgccatgtttcagaaacaactctggcgcatcgggcttcccatacaatcgatagattgtcgcacctgattgcccgacattatcgcgagcccatttatacccatataaatcagcatccatgttggaatttaatcgcggcctcgagcaagacgtttcccgttgaatatggctcataacaccccttgtattactgtttatgtaagcagacagttttattgttcatgatgatatatttttatcttgtgcaatgtaacatcagagattttgagacacaacgtggctttccccccccccccattattgaagcatttatcagggttattgtctcatgagcggatacatatttgaatgtatttagaaaaataaacaaataggggttccgcgcacatttccccgaaaagtgccacctgacgtctaagaaaccattattatcatgacattaacctataaaaataggcgtatcacgaggccctttcgtc

SEQ ID NO: 76 - DNA, 1701 bp, Influenza A virus
atgaagacaatactagtagttctgctatatacatttgcaaccgcaaatgcagacacattatgtataggttatcatgcgaacaattcaacagacactgtagacacagtactagaaaagaatgtaacagtaacacactctgttaaccttctagaagacaagcataacgggaaactatgcaaactaagaggggtagccccattgcatttgggtaaatgtaacattgctggctggatcctgggaaatccagagtgtgaatcactctccacagcaagctcatggtcctacattgtggaaacatctagttcagacaatggaacgtgttacccaggagatttcatcgattatgaggagctaagagagcaattgagctcagtgtcatcatttgaaaggtttgagatattccccaatacaagttcatggcccaatcatgactcgaacaaaggtgtaacggcagcatgtcctcatgctggagcaaaaagcttctacaaaaatttaatatggctagttaaaaaaggaaattcatacccaaagctcaacaaatcctatattaatgataaagggaaagaagtcctcgtgctatggggcattcaccatccatctactagtgctgaccaacaaagtctctatcagaatgcagatgcatatgtttttgtggggacatcaagatacagcaagaagttcaagccggaaatagcaataagacccaaagtgaggggtcaagaagggagaatgaactattactggacactagtaaagccgggagacaaaataacattcgaagcaactggaaatctagtggtaccgagatatgcattcgcaatggaaagaaatgctggatctggtattatcatttcagatacaccagtccacgattgcaatacaacttgtcagacacccaagggtgctataaacaccagcctcccatttcagaatatacatccgatcacaattggaaaatgtccaaaatatgtaaaaagcacaaaattgagactggccacaggattgaggaatgtcccgtctattcaatctagaggcctatttggggccattgccggtttcattgaaggggggtggacagggatggtagatggatggtacggttatcaccatcaaaatgagcaggggtcaggatatgcagccgacctgaagagcacacagaatgccattgacgagattactaacaaagtaaattctgttattgaaaagatgaatacacagttcacagcagtaggtaaagagttcaaccacctggaaaaaagaatagagaatttaaataaaaaggttgatgatggtttcctggacatttggacttacaatgccgaactgttggttctattggaaaatgaaagaactttggactaccacgattcaaatgtgaagaacttatatgaaaaggtaagaagccagttaaaaaacaatgccaaggaaattggaaacggctgctttgaattttaccacaaatgcgataacacgtgcatggaaagtgtcaaaaatgggacttatgactacccaaaatactcagaggaagcaaaattaaacagagaagaaatagatggggtaaagctggaatcaacaaggatttaccagattttggcgatctattcaactgtcgccagttcattggtactggtagtctccctgggggcaatcagtttctggatgtgctctaatgggtctctacagtgtagaatatgtatttga

SEQ ID NO: 77 - protein, 566 aa, Influenza A virus
MKTILVVLLYTFATANADTLCIGYHANNSTDTVDTVLEKNVTVTHSVNLLEDKHNGKLCKLRGVAPLHLGKCNIAGWILGNPECESLSTASSWSYIVETSSSDNGTCYPGDFIDYEELREQLSSVSSFERFEIFPNTSSWPNHDSNKGVTAACPHAGAKSFYKNLIWLVKKGNSYPKLNKSYINDKGKEVLVLWGIHHPSTSADQQSLYQNADAYVFVGTSRYSKKFKPEIAIRPKVRGQEGRMNYYWTLVKPGDKITFEATGNLVVPRYAFAMERNAGSGIIISDTPVHDCNTTCQTPKGAINTSLPFQNIHPITIGKCPKYVKSTKLRLATGLRNVPSIQSRGLFGAIAGFIEGGWTGMVDGWYGYHHQNEQGSGYAADLKSTQNAIDEITNKVNSVIEKMNTQFTAVGKEFNHLEKRIENLNKKVDDGFLDIWTYNAELLVLLENERTLDYHDSNVKNLYEKVRSQLKNNAKEIGNGCFEFYHKCDNTCMESVKNGTYDYPKYSEEAKLNREEIDGVKLESTRIYQILAIYSTVASSLVLVVSLGAISFWMCSNGSLQCRICI

SEQ ID NO: 78 - DNA, 1701 bp, Influenza A virus
tcaaatacatattctacactgtagagacccattagagcacatccagaaactgattgcccccagggagactaccagtaccaatgaactggcgacagttgaatagatcgccaaaatctggtaaatccttgttgattccagctttaccccatctatttcttctctgtttaattttgcttcctctgagtattttgggtagtcataagtcccatttttgacactttccatgcacgtgttatcgcatttgtggtaaaattcaaagcagccgtttccaatttccttggcattgttttttaactggcttcttaccttttcatataagttcttcacatttgaatcgtggtagtccaaagttctttcattttccaatagaaccaacagttcggcattgtaagtccaaatgtccaggaaaccatcatcaacctttttatttaaattctctattcttttttccaggtggttgaactctttacctactgctgtgaactgtgtattcatcttttcaataacagaatttactttgttagtaatctcgtcaatggcattctgtgtgctcttcaggtcggctgcatatcctgacccctgctcattttgatggtgataaccgtaccatccatctaccatccctgtccaccccccttcaatgaaaccggcaatggccccaaataggcctctagattgaatagacgggacattcctcaatcctgtggccagtctcaattttgtgctttttacatattttggacattttccaattgtgatcggatgtatattctgaaatgggaggctggtgtttatagcacccttgggtgtctgacaagttgtattgcaatcgtggactggtgtatctgaaatgataataccagatccagcatttctttccattgcgaatgcatatctcggtaccactagatttccagttgcttcgaatgttattttgtctcccggctttactagtgtccagtaatagttcattctcccttcttgacccctcactttgggtcttattgctatttccggcttgaacttcttgctgtatcttgatgtccccacaaaaacatatgcatctgcattctgatagagactttgttggtcagcactagtagatggatggtgaatgccccatagcacgaggacttctttccctttatcattaatataggatttgttgagctttgggtatgaatttccttttttaactagccatattaaatttttgtagaagctttttgctccagcatgaggacatgctgccgttacacctttgttcgagtcatgattgggccatgaacttgtattggggaatatctcaaacctttcaaatgatgacactgagctcaattgctctcttagctcctcataatcgatgaaatctcctgggtaacacgttccattgtctgaactagatgtttccacaatgtaggaccatgagcttgctgtggagagtgattcacactctggatttcccaggatccagccagcaatgttacatttacccaaatgcaatggggctacccctcttagtttgcatagtttcccgttatgcttgtcttctagaaggttaacagagtgtgttactgttacattcttttctagtactgtgtctacagtgtctgttgaattgttcgcatgataacctatacataatgtgtctgcatttgcggttgcaaatgtatatagcagaactactagtattgtcttcat

SEQ ID NO: 79 - DNA, 6128 bp, Influenza A virus
tcgcgcgtttcggtgatgacggtgaaaacctctgacacatgcagctcccggagacggtcacagcttgtctgtaagcggatgccgggagcagacaagcccgtcagggcgcgtcagcgggtgttggcgggtgtcggggctggcttaactatgcggcatcagagcagattgtactgagagtgcaccatatgcggtgtgaaataccgcacagatgcgtaaggagaaaataccgcatcagattggctattggccattgcatacgttgtatccatatcataatatgtacatttatattggctcatgtccaacattaccgccatgttgacattgattattgactagttattaatagtaatcaattacggggtcattagttcatagcccatatatggagttccgcgttacataacttacggtaaatggcccgcctggctgaccgcccaacgacccccgcccattgacgtcaataatgacgtatgttcccatagtaacgccaatagggactttccattgacgtcaatgggtggagtatttacggtaaactgcccacttggcagtacatcaagtgtatcatatgccaagtacgccccctattgacgtcaatgacggtaaatggcccgcctggcattatgcccagtacatgaccttatgggactttcctacttggcagtacatctacgtattagtcatcgctattaccatggtgatgcggttttggcagtacatcaatgggcgtggatagcggtttgactcacggggatttccaagtctccaccccattgacgtcaatgggagtttgttttggcaccaaaatcaacgggactttccaaaatgtcgtaacaactccgccccattgacgcaaatgggcggtaggcgtgtacggtgggaggtctatataagcagagctcgtttagtgaaccgtcagatcgcctggagacgccatccacgctgttttgacctccatagaagacaccgggaccgatccagcctccatcggctcgcatctctccttcacgcgcccgccgccctacctgaggccgccatccacgccggttgagtcgcgttctgccgcctcccgcctgtggtgcctcctgaactgcgtccgccgtctaggtaagtttaaagctcaggtcgagaccgggcctttgtccggcgctcccttggagcctacctagactcagccggctctccacgctttgcctgaccctgcttgctcaactctagttaacggtggagggcagtgtagtctgagcagtactcgttgctgccgcgcgcgccaccagacataatagctgacagactaacagactgttcctttccatgggtcttttctgcagtcaccgtcgtcgacacgtgtgatcagatatcgcggccgctctagagatatcgccaccatgaagacaatactagtagttctgctatatacatttgcaaccgcaaatgcagacacattatgtataggttatcatgcgaacaattcaacagacactgtagacacagtactagaaaagaatgtaacagtaacacactctgttaaccttctagaagacaagcataacgggaaactatgcaaactaagaggggtagccccattgcatttgggtaaatgtaacattgctggctggatcctgggaaatccagagtgtgaatcactctccacagcaagctcatggtcctacattgtggaaacatctagttcagacaatggaacgtgttacccaggagatttcatcgattatgaggagctaagagagcaattgagctcagtgtcatcatttgaaaggtttgagatattccccaagacaagttcatggcccaatcatgactcgaacaaaggtgtaacggcagcatgtcctcatgctggagcaaaaagcttctacaaaaatttaatatggctagttaaaaaaggaaattcatacccaaagctcaacaaatcctatattaatgataaagggaaagaagtcctcgtgctatggggcattcaccatccatctactagtgctgaccaacaaagtctctatcagaatgcagatgcatatgtttttgtggggacatcaagatacagcaagaagttcaagccggaaatagcaataagacccaaagtgaggggtcaagaagggagaatgaactattactggacactagtaaagccgggagacaaaataacattcgaagcaactggaaatctagtggtaccgagatatgcattcgcaatggaaagaaatgctggatctggtattatcatttcagatacaccagtccacgattgcaatacaacttgtcagacacccaagggtgctataaacaccagcctcccatttcagaatatacatccgatcacaattggaaaatgtccaaaatatgtaaaaagcacaaaattgagactggccacaggattgaggaatgtcccgtctattcaatctagaggcctatttggggccattgccggtttcattgaaggggggtggacagggatggtagatggatggtacggttatcaccatcaaaatgagcaggggtcaggatatgcagccgacctgaagagcacacagaatgccattgacgagattactaacaaagtaaattctgttattgaaaagatgaatacacagttcacagcagtaggtaaagagttcaaccacctggaaaaaagaatagagaatttaaataaaaaggttgatgatggtttcctggacatttggacttacaatgccgaactgttggttctattggaaaatgaaagaactttggactaccacgattcaaatgtgaagaacttatatgaaaaggtaagaagccagttaaaaaacaatgccaaggaaattggaaacggctgctttgaattttaccacaaatgcgataacacgtgcatggaaagtgtcaaaaatgggacttatgactacccaaaatactcagaggaagcaaaattaaacagagaagaaatagatggggtaaagctggaatcaacaaggatttaccagattttggcgatctattcaactgtcgccagttcattggtactggtagtctccctgggggcaatcagtttctggatgtgctctaatgggtctctacagtgtagaatatgtatttgatgaacacgtgggatccagatctgctgtgccttctagttgccagccatctgttgtttgcccctcccccgtgccttccttgaccctggaaggtgccactcccactgtcctttcctaataaaatgaggaaattgcatcgcattgtctgagtaggtgtcattctattctggggggtggggtggggcaggacagcaagggggaggattgggaagacaatagcaggcatgctggggatgcggtgggctctatgggtacccaggtgctgaagaattgacccggttcctcctgggccagaaagaagcaggcacatccccttctctgtgacacaccctgtccacgcccctggttcttagttccagccccactcataggacactcatagctcaggagggctccgccttcaatcccacccgctaaagtacttggagcggtctctccctccctcatcagcccaccaaaccaaacctagcctccaagagtgggaagaaattaaagcaagataggctattaagtgcagagggagagaaaatgcctccaacatgtgaggaagtaatgagagaaatcatagaattttaaggccatgatttaaggccatcatggccttaatcttccgcttcctcgctcactgactcgctgcgctcggtcgttcggctgcggcgagcggtatcagctcactcaaaggcggtaatacggttatccacagaatcaggggataacgcaggaaagaacatgtgagcaaaaggccagcaaaaggccaggaaccgtaaaaaggccgcgttgctggcgtttttccataggctccgcccccctgacgagcatcacaaaaatcgacgctcaagtcagaggtggcgaaacccgacaggactataaagataccaggcgtttccccctggaagctccctcgtgcgctctcctgttccgaccctgccgcttaccggatacctgtccgcctttctcccttcgggaagcgtggcgctttctcatagctcacgctgtaggtatctcagttcggtgtaggtcgttcgctccaagctgggctgtgtgcacgaaccccccgttcagcccgaccgctgcgccttatccggtaactatcgtcttgagtccaacccggtaagacacgacttatcgccactggcagcagccactggtaacaggattagcagagcgaggtatgtaggcggtgctacagagttcttgaagtggtggcctaactacggctacactagaagaacagtatttggtatctgcgctctgctgaagccagttaccttcggaaaaagagttggtagctcttgatccggcaaacaaaccaccgctggtagcggtggtttttttgtttgcaagcagcagattacgcgcagaaaaaaaggatctcaagaagatcctttgatcttttctacggggtctgacgctcagtggaacgaaaactcacgttaagggattttggtcatgagattatcaaaaaggatcttcacctagatccttttaaattaaaaatgaagttttaaatcaatctaaagtatatatgagtaaacttggtctgacagttaccaatgcttaatcagtgaggcacctatctcagcgatctgtctatttcgttcatccatagttgcctgactcggggggggggggcgctgaggtctgcctcgtgaagaaggtgttgctgactcataccaggcctgaatcgccccatcatccagccagaaagtgagggagccacggttgatgagagctttgttgtaggtggaccagttggtgattttgaacttttgctttgccacggaacggtctgcgttgtcgggaagatgcgtgatctgatccttcaactcagcaaaagttcgatttattcaacaaagccgccgtcccgtcaagtcagcgtaatgctctgccagtgttacaaccaattaaccaattctgattagaaaaactcatcgagcatcaaatgaaactgcaatttattcatatcaggattatcaataccatatttttgaaaaagccgtttctgtaatgaaggagaaaactcaccgaggcagttccataggatggcaagatcctggtatcggtctgcgattccgactcgtccaacatcaatacaacctattaatttcccctcgtcaaaaataaggttatcaagtgagaaatcaccatgagtgacgactgaatccggtgagaatggcaaaagcttatgcatttctttccagacttgttcaacaggccagccattacgctcgtcatcaaaatcactcgcatcaaccaaaccgttattcattcgtgattgcgcctgagcgagacgaaatacgcgatcgctgttaaaaggacaattacaaacaggaatcgaatgcaaccggcgcaggaacactgccagcgcatcaacaatattttcacctgaatcaggatattcttctaatacctggaatgctgttttcccggggatcgcagtggtgagtaaccatgcatcatcaggagtacggataaaatgcttgatggtcggaagaggcataaattccgtcagccagtttagtctgaccatctcatctgtaacatcattggcaacgctacctttgccatgtttcagaaacaactctggcgcatcgggcttcccatacaatcgatagattgtcgcacctgattgcccgacattatcgcgagcccatttatacccatataaatcagcatccatgttggaatttaatcgcggcctcgagcaagacgtttcccgttgaatatggctcataacaccccttgtattactgtttatgtaagcagacagttttattgttcatgatgatatatttttatcttgtgcaatgtaacatcagagattttgagacacaacgtggctttccccccccccccattattgaagcatttatcagggttattgtctcatgagcggatacatatttgaatgtatttagaaaaataaacaaataggggttccgcgcacatttccccgaaaagtgccacctgacgtctaagaaaccattattatcatgacattaacctataaaaataggcgtatcacgaggccctttcgtc

SEQ ID NO: 80 - DNA, 1701 bp, Influenza A virus
atgaagacaatactagtagttctgctatatacatttgcaaccgcaaatgcagacacattatgtataggttatcatgcgaacaattcaacagacactgtagacacagtactagaaaagaatgtaacagtaacacactctgttaaccttctagaagacaagcataacgggaaactatgcaaactaagaggggtagccccattgcatttgggtaaatgtaacattgctggctggatcctgggaaatccagagtgtgaatcactctccacagcaagctcatggtcctacattgtggaaacatctagttcagacaatggaacgtgttacccaggagatttcatcgattatgaggagctaagagagcaattgagctcagtgtcatcatttgaaaggtttgagatattccccaagacaagttcatggcccaatcatgactcgaacaaaggtgtaacggcagcatgtcctcatgctggagcaaaaagcttctacaaaaatttaatatggctagttaaaaaaggaaattcatacccaaagctcaacaaatcctatattaatgataaagggaaagaagtcctcgtgctatggggcattcaccatccatctactagtgctgaccaacaaagtctctatcagaatgcagatgcatatgtttttgtggggacatcaagatacagcaagaagttcaagccggaaatagcaataagacccaaagtgaggggtcaagaagggagaatgaactattactggacactagtaaagccgggagacaaaataacattcgaagcaactggaaatctagtggtaccgagatatgcattcgcaatggaaagaaatgctggatctggtattatcatttcagatacaccagtccacgattgcaatacaacttgtcagacacccaagggtgctataaacaccagcctcccatttcagaatatacatccgatcacaattggaaaatgtccaaaatatgtaaaaagcacaaaattgagactggccacaggattgaggaatgtcccgtctattcaatctagaggcctatttggggccattgccggtttcattgaaggggggtggacagggatggtagatggatggtacggttatcaccatcaaaatgagcaggggtcaggatatgcagccgacctgaagagcacacagaatgccattgacgagattactaacaaagtaaattctgttattgaaaagatgaatacacagttcacagcagtaggtaaagagttcaaccacctggaaaaaagaatagagaatttaaataaaaaggttgatgatggtttcctggacatttggacttacaatgccgaactgttggttctattggaaaatgaaagaactttggactaccacgattcaaatgtgaagaacttatatgaaaaggtaagaagccagttaaaaaacaatgccaaggaaattggaaacggctgctttgaattttaccacaaatgcgataacacgtgcatggaaagtgtcaaaaatgggacttatgactacccaaaatactcagaggaagcaaaattaaacagagaagaaatagatggggtaaagctggaatcaacaaggatttaccagattttggcgatctattcaactgtcgccagttcattggtactggtagtctccctgggggcaatcagtttctggatgtgctctaatgggtctctacagtgtagaatatgtatttga

SEQ ID NO: 81 - protein, 566 aa, Influenza A virus
MKTILVVLLYTFATANADTLCIGYHANNSTDTVDTVLEKNVTVTHSVNLLEDKHNGKLCKLRGVAPLHLGKCNIAGWILGNPECESLSTASSWSYIVETSSSDNGTCYPGDFIDYEELREQLSSVSSFERFEIFPKTSSWPNHDSNKGVTAACPHAGAKSFYKNLIWLVKKGNSYPKLNKSYINDKGKEVLVLWGIHHPSTSADQQSLYQNADAYVFVGTSRYSKKFKPEIAIRPKVRGQEGRMNYYWTLVKPGDKITFEATGNLVVPRYAFAMERNAGSGIIISDTPVHDCNTTCQTPKGAINTSLPFQNIHPITIGKCPKYVKSTKLRLATGLRNVPSIQSRGLFGAIAGFIEGGWTGMVDGWYGYHHQNEQGSGYAADLKSTQNAIDEITNKVNSVIEKMNTQFTAVGKEFNHLEKRIENLNKKVDDGFLDIWTYNAELLVLLENERTLDYHDSNVKNLYEKVRSQLKNNAKEIGNGCFEFYHKCDNTCMESVKNGTYDYPKYSEEAKLNREEIDGVKLESTRIYQILAIYSTVASSLVLVVSLGAISFWMCSNGSLQCRICI

SEQ ID NO: 82 - DNA, 1701 bp, Influenza A virus
tcaaatacatattctacactgtagagacccattagagcacatccagaaactgattgcccccagggagactaccagtaccaatgaactggcgacagttgaatagatcgccaaaatctggtaaatccttgttgattccagctttaccccatctatttcttctctgtttaattttgcttcctctgagtattttgggtagtcataagtcccatttttgacactttccatgcacgtgttatcgcatttgtggtaaaattcaaagcagccgtttccaatttccttggcattgttttttaactggcttcttaccttttcatataagttcttcacatttgaatcgtggtagtccaaagttctttcattttccaatagaaccaacagttcggcattgtaagtccaaatgtccaggaaaccatcatcaacctttttatttaaattctctattcttttttccaggtggttgaactctttacctactgctgtgaactgtgtattcatcttttcaataacagaatttactttgttagtaatctcgtcaatggcattctgtgtgctcttcaggtcggctgcatatcctgacccctgctcattttgatggtgataaccgtaccatccatctaccatccctgtccaccccccttcaatgaaaccggcaatggccccaaataggcctctagattgaatagacgggacattcctcaatcctgtggccagtctcaattttgtgctttttacatattttggacattttccaattgtgatcggatgtatattctgaaatgggaggctggtgtttatagcacccttgggtgtctgacaagttgtattgcaatcgtggactggtgtatctgaaatgataataccagatccagcatttctttccattgcgaatgcatatctcggtaccactagatttccagttgcttcgaatgttattttgtctcccggctttactagtgtccagtaatagttcattctcccttcttgacccctcactttgggtcttattgctatttccggcttgaacttcttgctgtatcttgatgtccccacaaaaacatatgcatctgcattctgatagagactttgttggtcagcactagtagatggatggtgaatgccccatagcacgaggacttctttccctttatcattaatataggatttgttgagctttgggtatgaatttccttttttaactagccatattaaatttttgtagaagctttttgctccagcatgaggacatgctgccgttacacctttgttcgagtcatgattgggccatgaacttgtcttggggaatatctcaaacctttcaaatgatgacactgagctcaattgctctcttagctcctcataatcgatgaaatctcctgggtaacacgttccattgtctgaactagatgtttccacaatgtaggaccatgagcttgctgtggagagtgattcacactctggatttcccaggatccagccagcaatgttacatttacccaaatgcaatggggctacccctcttagtttgcatagtttcccgttatgcttgtcttctagaaggttaacagagtgtgttactgttacattcttttctagtactgtgtctacagtgtctgttgaattgttcgcatgataacctatacataatgtgtctgcatttgcggttgcaaatgtatatagcagaactactagtattgtcttcat

SEQ ID NO: 83 - DNA, 6128 bp, Influenza A virus
tcgcgcgtttcggtgatgacggtgaaaacctctgacacatgcagctcccggagacggtcacagcttgtctgtaagcggatgccgggagcagacaagcccgtcagggcgcgtcagcgggtgttggcgggtgtcggggctggcttaactatgcggcatcagagcagattgtactgagagtgcaccatatgcggtgtgaaataccgcacagatgcgtaaggagaaaataccgcatcagattggctattggccattgcatacgttgtatccatatcataatatgtacatttatattggctcatgtccaacattaccgccatgttgacattgattattgactagttattaatagtaatcaattacggggtcattagttcatagcccatatatggagttccgcgttacataacttacggtaaatggcccgcctggctgaccgcccaacgacccccgcccattgacgtcaataatgacgtatgttcccatagtaacgccaatagggactttccattgacgtcaatgggtggagtatttacggtaaactgcccacttggcagtacatcaagtgtatcatatgccaagtacgccccctattgacgtcaatgacggtaaatggcccgcctggcattatgcccagtacatgaccttatgggactttcctacttggcagtacatctacgtattagtcatcgctattaccatggtgatgcggttttggcagtacatcaatgggcgtggatagcggtttgactcacggggatttccaagtctccaccccattgacgtcaatgggagtttgttttggcaccaaaatcaacgggactttccaaaatgtcgtaacaactccgccccattgacgcaaatgggcggtaggcgtgtacggtgggaggtctatataagcagagctcgtttagtgaaccgtcagatcgcctggagacgccatccacgctgttttgacctccatagaagacaccgggaccgatccagcctccatcggctcgcatctctccttcacgcgcccgccgccctacctgaggccgccatccacgccggttgagtcgcgttctgccgcctcccgcctgtggtgcctcctgaactgcgtccgccgtctaggtaagtttaaagctcaggtcgagaccgggcctttgtccggcgctcccttggagcctacctagactcagccggctctccacgctttgcctgaccctgcttgctcaactctagttaacggtggagggcagtgtagtctgagcagtactcgttgctgccgcgcgcgccaccagacataatagctgacagactaacagactgttcctttccatgggtcttttctgcagtcaccgtcgtcgacacgtgtgatcagatatcgcggccgctctagagatatcgccaccatgaaggcaatactagtagttctgctatatacatttgcaaccgcaaatgcagacacattatgtataggttatcatgcgaacaattcaacagacactgtagacacagtactagaaaagaatgtaacagtaacacactctgttaaccttctagaagacaagcataacgggaaactatgcaaactaagaggggtagccccattgcatttgggtaaatgtaacattgctggctggatcctgggaaatccagagtgtgaatcactctccacagcaagctcatggtcctacattgtggaaacatctagttcagacaatggaacgtgttacccaggagatttcatcgattatgaggagctaagagagcaattgagctcagtgtcatcatttgaaaggtttgagatattccccaagacaagttcatggcccaatcatgactcgaacaaaggtgtaacggcagcatgtcctcatgctggagcaaaaagcttctacaaaaatttaatatggctagttaaaaaaggaaattcatacccaaagctcaacaaatcctatattaatgataaagggaaagaagtcctcgtgctatggggcattcaccatccatctactagtgctgaccaacaaagtctctatcagaatgcagatgcatatgtttttgtggggacatcaagatacagcaagaagttcaagccggaaatagcaataagacccaaagtgagggatcaagaagggagaatgaactattactggacactagtagagccgggagacaaaataacattcgaagcaactggaaatctagtggtaccgagatatgcattcgcaatggaaagaaatgctggatctggtattatcatttcagatacaccagtccacgattgcaatacaacttgtcagacacccaagggtgctataaacaccagcctcccatttcagaatatacatccgatcacaattggaaaatgtccaaaatatgtaaaaagcacaaaattgagactggccacaggattgaggaatgtcccgtctattcaatctagaggcctatttggggccattgccggtttcattgaaggggggtggacagggatggtagatggatggtacggttatcaccatcaaaatgagcaggggtcaggatatgcagccgacctgaagagcacacagaatgccattgacgagattactaacaaagtaaattctgttattgaaaagatgaatacacagttcacagcagtaggtaaagagttcaaccacctggaaaaaagaatagagaatttaaataaaaaggttgatgatggtttcctggacatttggacttacaatgccgaactgttggttctattggaaaatgaaagaactttggactaccacgattcaaatgtgaagaacttatatgaaaaggtaagaagccaattaaaaaacaatgccaaggaaattggaaacggctgctttgaattttaccacaaatgcgataacacgtgcatggaaagtgtcaaaaatgggacttatgactacccaaaatactcagaggaagcaaaattaaacagagaagaaatagatggggtaaagctggaatcaacaaggatttaccagattttggcgatctattcaactgtcgccagttcattggtactggtagtctccctgggggcaatcagtttctggatgtgctctaatgggtctctacagtgtagaatatgtatttgatgaacacgtgggatccagatctgctgtgccttctagttgccagccatctgttgtttgcccctcccccgtgccttccttgaccctggaaggtgccactcccactgtcctttcctaataaaatgaggaaattgcatcgcattgtctgagtaggtgtcattctattctggggggtggggtggggcaggacagcaagggggaggattgggaagacaatagcaggcatgctggggatgcggtgggctctatgggtacccaggtgctgaagaattgacccggttcctcctgggccagaaagaagcaggcacatccccttctctgtgacacaccctgtccacgcccctggttcttagttccagccccactcataggacactcatagctcaggagggctccgccttcaatcccacccgctaaagtacttggagcggtctctccctccctcatcagcccaccaaaccaaacctagcctccaagagtgggaagaaattaaagcaagataggctattaagtgcagagggagagaaaatgcctccaacatgtgaggaagtaatgagagaaatcatagaattttaaggccatgatttaaggccatcatggccttaatcttccgcttcctcgctcactgactcgctgcgctcggtcgttcggctgcggcgagcggtatcagctcactcaaaggcggtaatacggttatccacagaatcaggggataacgcaggaaagaacatgtgagcaaaaggccagcaaaaggccaggaaccgtaaaaaggccgcgttgctggcgtttttccataggctccgcccccctgacgagcatcacaaaaatcgacgctcaagtcagaggtggcgaaacccgacaggactataaagataccaggcgtttccccctggaagctccctcgtgcgctctcctgttccgaccctgccgcttaccggatacctgtccgcctttctcccttcgggaagcgtggcgctttctcatagctcacgctgtaggtatctcagttcggtgtaggtcgttcgctccaagctgggctgtgtgcacgaaccccccgttcagcccgaccgctgcgccttatccggtaactatcgtcttgagtccaacccggtaagacacgacttatcgccactggcagcagccactggtaacaggattagcagagcgaggtatgtaggcggtgctacagagttcttgaagtggtggcctaactacggctacactagaagaacagtatttggtatctgcgctctgctgaagccagttaccttcggaaaaagagttggtagctcttgatccggcaaacaaaccaccgctggtagcggtggtttttttgtttgcaagcagcagattacgcgcagaaaaaaaggatctcaagaagatcctttgatcttttctacggggtctgacgctcagtggaacgaaaactcacgttaagggattttggtcatgagattatcaaaaaggatcttcacctagatccttttaaattaaaaatgaagttttaaatcaatctaaagtatatatgagtaaacttggtctgacagttaccaatgcttaatcagtgaggcacctatctcagcgatctgtctatttcgttcatccatagttgcctgactcggggggggggggcgctgaggtctgcctcgtgaagaaggtgttgctgactcataccaggcctgaatcgccccatcatccagccagaaagtgagggagccacggttgatgagagctttgttgtaggtggaccagttggtgattttgaacttttgctttgccacggaacggtctgcgttgtcgggaagatgcgtgatctgatccttcaactcagcaaaagttcgatttattcaacaaagccgccgtcccgtcaagtcagcgtaatgctctgccagtgttacaaccaattaaccaattctgattagaaaaactcatcgagcatcaaatgaaactgcaatttattcatatcaggattatcaataccatatttttgaaaaagccgtttctgtaatgaaggagaaaactcaccgaggcagttccataggatggcaagatcctggtatcggtctgcgattccgactcgtccaacatcaatacaacctattaatttcccctcgtcaaaaataaggttatcaagtgagaaatcaccatgagtgacgactgaatccggtgagaatggcaaaagcttatgcatttctttccagacttgttcaacaggccagccattacgctcgtcatcaaaatcactcgcatcaaccaaaccgttattcattcgtgattgcgcctgagcgagacgaaatacgcgatcgctgttaaaaggacaattacaaacaggaatcgaatgcaaccggcgcaggaacactgccagcgcatcaacaatattttcacctgaatcaggatattcttctaatacctggaatgctgttttcccggggatcgcagtggtgagtaaccatgcatcatcaggagtacggataaaatgcttgatggtcggaagaggcataaattccgtcagccagtttagtctgaccatctcatctgtaacatcattggcaacgctacctttgccatgtttcagaaacaactctggcgcatcgggcttcccatacaatcgatagattgtcgcacctgattgcccgacattatcgcgagcccatttatacccatataaatcagcatccatgttggaatttaatcgcggcctcgagcaagacgtttcccgttgaatatggctcataacaccccttgtattactgtttatgtaagcagacagttttattgttcatgatgatatatttttatcttgtgcaatgtaacatcagagattttgagacacaacgtggctttccccccccccccattattgaagcatttatcagggttattgtctcatgagcggatacatatttgaatgtatttagaaaaataaacaaataggggttccgcgcacatttccccgaaaagtgccacctgacgtctaagaaaccattattatcatgacattaacctataaaaataggcgtatcacgaggccctttcgtc

SEQ ID NO: 84 - DNA, 1701 bp, Influenza A virus
atgaaggcaatactagtagttctgctatatacatttgcaaccgcaaatgcagacacattatgtataggttatcatgcgaacaattcaacagacactgtagacacagtactagaaaagaatgtaacagtaacacactctgttaaccttctagaagacaagcataacgggaaactatgcaaactaagaggggtagccccattgcatttgggtaaatgtaacattgctggctggatcctgggaaatccagagtgtgaatcactctccacagcaagctcatggtcctacattgtggaaacatctagttcagacaatggaacgtgttacccaggagatttcatcgattatgaggagctaagagagcaattgagctcagtgtcatcatttgaaaggtttgagatattccccaagacaagttcatggcccaatcatgactcgaacaaaggtgtaacggcagcatgtcctcatgctggagcaaaaagcttctacaaaaatttaatatggctagttaaaaaaggaaattcatacccaaagctcaacaaatcctatattaatgataaagggaaagaagtcctcgtgctatggggcattcaccatccatctactagtgctgaccaacaaagtctctatcagaatgcagatgcatatgtttttgtggggacatcaagatacagcaagaagttcaagccggaaatagcaataagacccaaagtgagggatcaagaagggagaatgaactattactggacactagtagagccgggagacaaaataacattcgaagcaactggaaatctagtggtaccgagatatgcattcgcaatggaaagaaatgctggatctggtattatcatttcagatacaccagtccacgattgcaatacaacttgtcagacacccaagggtgctataaacaccagcctcccatttcagaatatacatccgatcacaattggaaaatgtccaaaatatgtaaaaagcacaaaattgagactggccacaggattgaggaatgtcccgtctattcaatctagaggcctatttggggccattgccggtttcattgaaggggggtggacagggatggtagatggatggtacggttatcaccatcaaaatgagcaggggtcaggatatgcagccgacctgaagagcacacagaatgccattgacgagattactaacaaagtaaattctgttattgaaaagatgaatacacagttcacagcagtaggtaaagagttcaaccacctggaaaaaagaatagagaatttaaataaaaaggttgatgatggtttcctggacatttggacttacaatgccgaactgttggttctattggaaaatgaaagaactttggactaccacgattcaaatgtgaagaacttatatgaaaaggtaagaagccaattaaaaaacaatgccaaggaaattggaaacggctgctttgaattttaccacaaatgcgataacacgtgcatggaaagtgtcaaaaatgggacttatgactacccaaaatactcagaggaagcaaaattaaacagagaagaaatagatggggtaaagctggaatcaacaaggatttaccagattttggcgatctattcaactgtcgccagttcattggtactggtagtctccctgggggcaatcagtttctggatgtgctctaatgggtctctacagtgtagaatatgtatttga

SEQ ID NO: 85 - protein, 566 aa, Influenza A virus; identical to SEQ ID NO: 69

SEQ ID NO: 86 - DNA, 1701 bp, Influenza A virus
tcaaatacatattctacactgtagagacccattagagcacatccagaaactgattgcccccagggagactaccagtaccaatgaactggcgacagttgaatagatcgccaaaatctggtaaatccttgttgattccagctttaccccatctatttcttctctgtttaattttgcttcctctgagtattttgggtagtcataagtcccatttttgacactttccatgcacgtgttatcgcatttgtggtaaaattcaaagcagccgtttccaatttccttggcattgttttttaattggcttcttaccttttcatataagttcttcacatttgaatcgtggtagtccaaagttctttcattttccaatagaaccaacagttcggcattgtaagtccaaatgtccaggaaaccatcatcaacctttttatttaaattctctattcttttttccaggtggttgaactctttacctactgctgtgaactgtgtattcatcttttcaataacagaatttactttgttagtaatctcgtcaatggcattctgtgtgctcttcaggtcggctgcatatcctgacccctgctcattttgatggtgataaccgtaccatccatctaccatccctgtccaccccccttcaatgaaaccggcaatggccccaaataggcctctagattgaatagacgggacattcctcaatcctgtggccagtctcaattttgtgctttttacatattttggacattttccaattgtgatcggatgtatattctgaaatgggaggctggtgtttatagcacccttgggtgtctgacaagttgtattgcaatcgtggactggtgtatctgaaatgataataccagatccagcatttctttccattgcgaatgcatatctcggtaccactagatttccagttgcttcgaatgttattttgtctcccggctctactagtgtccagtaatagttcattctcccttcttgatccctcactttgggtcttattgctatttccggcttgaacttcttgctgtatcttgatgtccccacaaaaacatatgcatctgcattctgatagagactttgttggtcagcactagtagatggatggtgaatgccccatagcacgaggacttctttccctttatcattaatataggatttgttgagctttgggtatgaatttccttttttaactagccatattaaatttttgtagaagctttttgctccagcatgaggacatgctgccgttacacctttgttcgagtcatgattgggccatgaacttgtcttggggaatatctcaaacctttcaaatgatgacactgagctcaattgctctcttagctcctcataatcgatgaaatctcctgggtaacacgttccattgtctgaactagatgtttccacaatgtaggaccatgagcttgctgtggagagtgattcacactctggatttcccaggatccagccagcaatgttacatttacccaaatgcaatggggctacccctcttagtttgcatagtttcccgttatgcttgtcttctagaaggttaacagagtgtgttactgttacattcttttctagtactgtgtctacagtgtctgttgaattgttcgcatgataacctatacataatgtgtctgcatttgcggttgcaaatgtatatagcagaactactagtattgccttcat

SEQ ID NO: 87 - DNA, 6128 bp, Influenza A virus
tcgcgcgtttcggtgatgacggtgaaaacctctgacacatgcagctcccggagacggtcacagcttgtctgtaagcggatgccgggagcagacaagcccgtcagggcgcgtcagcgggtgttggcgggtgtcggggctggcttaactatgcggcatcagagcagattgtactgagagtgcaccatatgcggtgtgaaataccgcacagatgcgtaaggagaaaataccgcatcagattggctattggccattgcatacgttgtatccatatcataatatgtacatttatattggctcatgtccaacattaccgccatgttgacattgattattgactagttattaatagtaatcaattacggggtcattagttcatagcccatatatggagttccgcgttacataacttacggtaaatggcccgcctggctgaccgcccaacgacccccgcccattgacgtcaataatgacgtatgttcccatagtaacgccaatagggactttccattgacgtcaatgggtggagtatttacggtaaactgcccacttggcagtacatcaagtgtatcatatgccaagtacgccccctattgacgtcaatgacggtaaatggcccgcctggcattatgcccagtacatgaccttatgggactttcctacttggcagtacatctacgtattagtcatcgctattaccatggtgatgcggttttggcagtacatcaatgggcgtggatagcggtttgactcacggggatttccaagtctccaccccattgacgtcaatgggagtttgttttggcaccaaaatcaacgggactttccaaaatgtcgtaacaactccgccccattgacgcaaatgggcggtaggcgtgtacggtgggaggtctatataagcagagctcgtttagtgaaccgtcagatcgcctggagacgccatccacgctgttttgacctccatagaagacaccgggaccgatccagcctccatcggctcgcatctctccttcacgcgcccgccgccctacctgaggccgccatccacgccggttgagtcgcgttctgccgcctcccgcctgtggtgcctcctgaactgcgtccgccgtctaggtaagtttaaagctcaggtcgagaccgggcctttgtccggcgctcccttggagcctacctagactcagccggctctccacgctttgcctgaccctgcttgctcaactctagttaacggtggagggcagtgtagtctgagcagtactcgttgctgccgcgcgcgccaccagacataatagctgacagactaacagactgttcctttccatgggtcttttctgcagtcaccgtcgtcgacacgtgtgatcagatatcgcggccgctctagagatatcgccaccatgaaggcaatactagtagttctgctatatacatttgcaaccgcaaatgcagacacattatgtataggttatcatgcgaacaattcaacagacactgtagacacagtactagaaaagaatgtaacagtaacacactctgttaaccttctagaagacaagcataacgggaaactatgcaaactaagaggggtagccccattgcatttgggtaaatgtaacattgctggctggatcctgggaaatccagagtgtgaatcactctccacagcaagctcatggtcctacattgtggaaacatctagttcagacaatggaacgtgttacccaggagatttcatcgattatgaggagctaagagagcaattgagctcagtgtcatcatttgaaaggtttgagatattccccaagacaagttcatggcccaatcatgactcgaacaaaggtgtaacggcagcatgtcctcatgctggagcaaaaagcttctacaaaaatttaatatggctagttaaaaaaggaaattcatacccaaagctcaacaaatcctatattaatgataaagggaaagaagtcctcgtgctatggggcattcaccatccatctactagtgctgaccaacaaagtctctatcagaatgcagatgcatatgtttttgtggggacatcaagatacagcaagaagttcaagccggaaatagcaataagacccaaagtgagggatcaagaagggagaatgaactattactggacactagtagagccaggagacaaaataacattcgaagcaactggaaatctagtggtaccgagatatgcattcgcaatggaaagaaatggtggatctggtattatcatttcagatacaccagtccacgattgcaatacaacttgtcagacacccaagggtgctataaacaccagcctcccatttcagaatatacatccgatcacaattggaaaatgtccaaaatatgtaaaaagcacaaaattgagactggccacaggattgaggaatgtcccgtctattcaatctagaggcctatttggggccattgccggtttcattgaaggggggtggacagggatggtagatggatggtacggttatcaccatcaaaatgagcaggggtcaggatatgcagccgacctgaagagcacacagaatgccattgacgagattactaacaaagtaaattctgttattgaaaagatgaatacacagttcacagcagtaggtaaagagttcaaccacctggaaaaaagaatagagaatttaaataaaaaggttgatgatggtttcctggacatttggacttacaatgccgaactgttggttctattggaaaatgaaagaactttggactaccacgattcaaatgtgaagaacttatatgaaaaggtaagaagccagttaaaaaacaatgccaaggaaattggaaacggctgctttgaattttaccacaaatgcgataacacgtgcatggaaagtgtcaaaaatgggacttatgactacccaaaatactcagaggaagcaaaattaaacagagaagaaatagatggggtaaagctggaatcaacaaggatttaccagattttggcgatctattcaactgtcgccagttcattggtactggtagtctccctgggggcaatcagtttctggatgtgctctaatgggtctctacagtgtagaatatgtatttgatgaacacgtgggatccagatctgctgtgccttctagttgccagccatctgttgtttgcccctcccccgtgccttccttgaccctggaaggtgccactcccactgtcctttcctaataaaatgaggaaattgcatcgcattgtctgagtaggtgtcattctattctggggggtggggtggggcaggacagcaagggggaggattgggaagacaatagcaggcatgctggggatgcggtgggctctatgggtacccaggtgctgaagaattgacccggttcctcctgggccagaaagaagcaggcacatccccttctctgtgacacaccctgtccacgcccctggttcttagttccagccccactcataggacactcatagctcaggagggctccgccttcaatcccacccgctaaagtacttggagcggtctctccctccctcatcagcccaccaaaccaaacctagcctccaagagtgggaagaaattaaagcaagataggctattaagtgcagagggagagaaaatgcctccaacatgtgaggaagtaatgagagaaatcatagaattttaaggccatgatttaaggccatcatggccttaatcttccgcttcctcgctcactgactcgctgcgctcggtcgttcggctgcggcgagcggtatcagctcactcaaaggcggtaatacggttatccacagaatcaggggataacgcaggaaagaacatgtgagcaaaaggccagcaaaaggccaggaaccgtaaaaaggccgcgttgctggcgtttttccataggctccgcccccctgacgagcatcacaaaaatcgacgctcaagtcagaggtggcgaaacccgacaggactataaagataccaggcgtttccccctggaagctccctcgtgcgctctcctgttccgaccctgccgcttaccggatacctgtccgcctttctcccttcgggaagcgtggcgctttctcatagctcacgctgtaggtatctcagttcggtgtaggtcgttcgctccaagctgggctgtgtgcacgaaccccccgttcagcccgaccgctgcgccttatccggtaactatcgtcttgagtccaacccggtaagacacgacttatcgccactggcagcagccactggtaacaggattagcagagcgaggtatgtaggcggtgctacagagttcttgaagtggtggcctaactacggctacactagaagaacagtatttggtatctgcgctctgctgaagccagttaccttcggaaaaagagttggtagctcttgatccggcaaacaaaccaccgctggtagcggtggtttttttgtttgcaagcagcagattacgcgcagaaaaaaaggatctcaagaagatcctttgatcttttctacggggtctgacgctcagtggaacgaaaactcacgttaagggattttggtcatgagattatcaaaaaggatcttcacctagatccttttaaattaaaaatgaagttttaaatcaatctaaagtatatatgagtaaacttggtctgacagttaccaatgcttaatcagtgaggcacctatctcagcgatctgtctatttcgttcatccatagttgcctgactcggggggggggggcgctgaggtctgcctcgtgaagaaggtgttgctgactcataccaggcctgaatcgccccatcatccagccagaaagtgagggagccacggttgatgagagctttgttgtaggtggaccagttggtgattttgaacttttgctttgccacggaacggtctgcgttgtcgggaagatgcgtgatctgatccttcaactcagcaaaagttcgatttattcaacaaagccgccgtcccgtcaagtcagcgtaatgctctgccagtgttacaaccaattaaccaattctgattagaaaaactcatcgagcatcaaatgaaactgcaatttattcatatcaggattatcaataccatatttttgaaaaagccgtttctgtaatgaaggagaaaactcaccgaggcagttccataggatggcaagatcctggtatcggtctgcgattccgactcgtccaacatcaatacaacctattaatttcccctcgtcaaaaataaggttatcaagtgagaaatcaccatgagtgacgactgaatccggtgagaatggcaaaagcttatgcatttctttccagacttgttcaacaggccagccattacgctcgtcatcaaaatcactcgcatcaaccaaaccgttattcattcgtgattgcgcctgagcgagacgaaatacgcgatcgctgttaaaaggacaattacaaacaggaatcgaatgcaaccggcgcaggaacactgccagcgcatcaacaatattttcacctgaatcaggatattcttctaatacctggaatgctgttttcccggggatcgcagtggtgagtaaccatgcatcatcaggagtacggataaaatgcttgatggtcggaagaggcataaattccgtcagccagtttagtctgaccatctcatctgtaacatcattggcaacgctacctttgccatgtttcagaaacaactctggcgcatcgggcttcccatacaatcgatagattgtcgcacctgattgcccgacattatcgcgagcccatttatacccatataaatcagcatccatgttggaatttaatcgcggcctcgagcaagacgtttcccgttgaatatggctcataacaccccttgtattactgtttatgtaagcagacagttttattgttcatgatgatatatttttatcttgtgcaatgtaacatcagagattttgagacacaacgtggctttccccccccccccattattgaagcatttatcagggttattgtctcatgagcggatacatatttgaatgtatttagaaaaataaacaaataggggttccgcgcacatttccccgaaaagtgccacctgacgtctaagaaaccattattatcatgacattaacctataaaaataggcgtatcacgaggccctttcgtc

SEQ ID NO: 88 - DNA, 1701 bp, Influenza A virus
atgaaggcaatactagtagttctgctatatacatttgcaaccgcaaatgcagacacattatgtataggttatcatgcgaacaattcaacagacactgtagacacagtactagaaaagaatgtaacagtaacacactctgttaaccttctagaagacaagcataacgggaaactatgcaaactaagaggggtagccccattgcatttgggtaaatgtaacattgctggctggatcctgggaaatccagagtgtgaatcactctccacagcaagctcatggtcctacattgtggaaacatctagttcagacaatggaacgtgttacccaggagatttcatcgattatgaggagctaagagagcaattgagctcagtgtcatcatttgaaaggtttgagatattccccaagacaagttcatggcccaatcatgactcgaacaaaggtgtaacggcagcatgtcctcatgctggagcaaaaagcttctacaaaaatttaatatggctagttaaaaaaggaaattcatacccaaagctcaacaaatcctatattaatgataaagggaaagaagtcctcgtgctatggggcattcaccatccatctactagtgctgaccaacaaagtctctatcagaatgcagatgcatatgtttttgtggggacatcaagatacagcaagaagttcaagccggaaatagcaataagacccaaagtgagggatcaagaagggagaatgaactattactggacactagtagagccaggagacaaaataacattcgaagcaactggaaatctagtggtaccgagatatgcattcgcaatggaaagaaatggtggatctggtattatcatttcagatacaccagtccacgattgcaatacaacttgtcagacacccaagggtgctataaacaccagcctcccatttcagaatatacatccgatcacaattggaaaatgtccaaaatatgtaaaaagcacaaaattgagactggccacaggattgaggaatgtcccgtctattcaatctagaggcctatttggggccattgccggtttcattgaaggggggtggacagggatggtagatggatggtacggttatcaccatcaaaatgagcaggggtcaggatatgcagccgacctgaagagcacacagaatgccattgacgagattactaacaaagtaaattctgttattgaaaagatgaatacacagttcacagcagtaggtaaagagttcaaccacctggaaaaaagaatagagaatttaaataaaaaggttgatgatggtttcctggacatttggacttacaatgccgaactgttggttctattggaaaatgaaagaactttggactaccacgattcaaatgtgaagaacttatatgaaaaggtaagaagccagttaaaaaacaatgccaaggaaattggaaacggctgctttgaattttaccacaaatgcgataacacgtgcatggaaagtgtcaaaaatgggacttatgactacccaaaatactcagaggaagcaaaattaaacagagaagaaatagatggggtaaagctggaatcaacaaggatttaccagattttggcgatctattcaactgtcgccagttcattggtactggtagtctccctgggggcaatcagtttctggatgtgctctaatgggtctctacagtgtagaatatgtatttga

SEQ ID NO: 89 - protein, 566 aa, Influenza A virus
MKAILVVLLYTFATANADTLCIGYHANNSTDTVDTVLEKNVTVTHSVNLLEDKHNGKLCKLRGVAPLHLGKCNIAGWILGNPECESLSTASSWSYIVETSSSDNGTCYPGDFIDYEELREQLSSVSSFERFEIFPKTSSWPNHDSNKGVTAACPHAGAKSFYKNLIWLVKKGNSYPKLNKSYINDKGKEVLVLWGIHHPSTSADQQSLYQNADAYVFVGTSRYSKKFKPEIAIRPKVRDQEGRMNYYWTLVEPGDKITFEATGNLVVPRYAFAMERNGGSGIIISDTPVHDCNTTCQTPKGAINTSLPFQNIHPITIGKCPKYVKSTKLRLATGLRNVPSIQSRGLFGAIAGFIEGGWTGMVDGWYGYHHQNEQGSGYAADLKSTQNAIDEITNKVNSVIEKMNTQFTAVGKEFNHLEKRIENLNKKVDDGFLDIWTYNAELLVLLENERTLDYHDSNVKNLYEKVRSQLKNNAKEIGNGCFEFYHKCDNTCMESVKNGTYDYPKYSEEAKLNREEIDGVKLESTRIYQILAIYSTVASSLVLVVSLGAISFWMCSNGSLQCRICI

SEQ ID NO: 90 - DNA, 1701 bp, Influenza A virus
tcaaatacatattctacactgtagagacccattagagcacatccagaaactgattgcccccagggagactaccagtaccaatgaactggcgacagttgaatagatcgccaaaatctggtaaatccttgttgattccagctttaccccatctatttcttctctgtttaattttgcttcctctgagtattttgggtagtcataagtcccatttttgacactttccatgcacgtgttatcgcatttgtggtaaaattcaaagcagccgtttccaatttccttggcattgttttttaactggcttcttaccttttcatataagttcttcacatttgaatcgtggtagtccaaagttctttcattttccaatagaaccaacagttcggcattgtaagtccaaatgtccaggaaaccatcatcaacctttttatttaaattctctattcttttttccaggtggttgaactctttacctactgctgtgaactgtgtattcatcttttcaataacagaatttactttgttagtaatctcgtcaatggcattctgtgtgctcttcaggtcggctgcatatcctgacccctgctcattttgatggtgataaccgtaccatccatctaccatccctgtccaccccccttcaatgaaaccggcaatggccccaaataggcctctagattgaatagacgggacattcctcaatcctgtggccagtctcaattttgtgctttttacatattttggacattttccaattgtgatcggatgtatattctgaaatgggaggctggtgtttatagcacccttgggtgtctgacaagttgtattgcaatcgtggactggtgtatctgaaatgataataccagatccaccatttctttccattgcgaatgcatatctcggtaccactagatttccagttgcttcgaatgttattttgtctcctggctctactagtgtccagtaatagttcattctcccttcttgatccctcactttgggtcttattgctatttccggcttgaacttcttgctgtatcttgatgtccccacaaaaacatatgcatctgcattctgatagagactttgttggtcagcactagtagatggatggtgaatgccccatagcacgaggacttctttccctttatcattaatataggatttgttgagctttgggtatgaatttccttttttaactagccatattaaatttttgtagaagctttttgctccagcatgaggacatgctgccgttacacctttgttcgagtcatgattgggccatgaacttgtcttggggaatatctcaaacctttcaaatgatgacactgagctcaattgctctcttagctcctcataatcgatgaaatctcctgggtaacacgttccattgtctgaactagatgtttccacaatgtaggaccatgagcttgctgtggagagtgattcacactctggatttcccaggatccagccagcaatgttacatttacccaaatgcaatggggctacccctcttagtttgcatagtttcccgttatgcttgtcttctagaaggttaacagagtgtgttactgttacattcttttctagtactgtgtctacagtgtctgttgaattgttcgcatgataacctatacataatgtgtctgcatttgcggttgcaaatgtatatagcagaactactagtattgccttcat

SEQ ID NO: 91 - DNA, 6128 bp, Influenza A virus
tcgcgcgtttcggtgatgacggtgaaaacctctgacacatgcagctcccggagacggtcacagcttgtctgtaagcggatgccgggagcagacaagcccgtcagggcgcgtcagcgggtgttggcgggtgtcggggctggcttaactatgcggcatcagagcagattgtactgagagtgcaccatatgcggtgtgaaataccgcacagatgcgtaaggagaaaataccgcatcagattggctattggccattgcatacgttgtatccatatcataatatgtacatttatattggctcatgtccaacattaccgccatgttgacattgattattgactagttattaatagtaatcaattacggggtcattagttcatagcccatatatggagttccgcgttacataacttacggtaaatggcccgcctggctgaccgcccaacgacccccgcccattgacgtcaataatgacgtatgttcccatagtaacgccaatagggactttccattgacgtcaatgggtggagtatttacggtaaactgcccacttggcagtacatcaagtgtatcatatgccaagtacgccccctattgacgtcaatgacggtaaatggcccgcctggcattatgcccagtacatgaccttatgggactttcctacttggcagtacatctacgtattagtcatcgctattaccatggtgatgcggttttggcagtacatcaatgggcgtggatagcggtttgactcacggggatttccaagtctccaccccattgacgtcaatgggagtttgttttggcaccaaaatcaacgggactttccaaaatgtcgtaacaactccgccccattgacgcaaatgggcggtaggcgtgtacggtgggaggtctatataagcagagctcgtttagtgaaccgtcagatcgcctggagacgccatccacgctgttttgacctccatagaagacaccgggaccgatccagcctccatcggctcgcatctctccttcacgcgcccgccgccctacctgaggccgccatccacgccggttgagtcgcgttctgccgcctcccgcctgtggtgcctcctgaactgcgtccgccgtctaggtaagtttaaagctcaggtcgagaccgggcctttgtccggcgctcccttggagcctacctagactcagccggctctccacgctttgcctgaccctgcttgctcaactctagttaacggtggagggcagtgtagtctgagcagtactcgttgctgccgcgcgcgccaccagacataatagctgacagactaacagactgttcctttccatgggtcttttctgcagtcaccgtcgtcgacacgtgtgatcagatatcgcggccgctctagagatatcgccaccatgaaggcaatactagtagttctgctatatacatttgcaaccgcaaatgcagacacattatgtataggttatcatgcgaacaattcaacagacactgtagacacagtactagaaaagaatgtaacagtaacacactctgttaaccttctagaagacaagcataacgggaaactatgcaaactaagaggggtagccccattgcatttgggtaaatgtaacattgctggctggatcctgggaaatccagagtgtgaatcactctccacagcaagctcatggtcctacattgtggaaacatctagttcaaacaatggaacgtgttacccaggagatttcatcgattatgaggagctaagagagcaattgagctcagtgtcatcatttgaaaggtttgagatattccccaagacaagttcatggcccaatcatgactcgaacaaaggtgtaacggcagcatgtcctcatgctggagcaaaaagcttctacaaaaatttaatatggctagttaaaaaagaaaattcatacccaaagctcaacaaatcctatattaatgataaagggaaagaagtcctcgtgctatggggcattcaccatccatctactagtgctgaccaacaaagtctctatcagaatgcagatgcatatgtttttgtggggacatcaagatacagcaagaagttcaagccggaaatagcaataagacccaaagtgaggggtcaagaagggagaatgaactattactggacactagtagagccgggagacaaaataacattcgaagcaactggaaatctagtggtaccgagatatgcattcgcaatggaaagaaatgctggatctggtattatcatttcagatacaccagtccacgattgcaatacaacttgtcagacacccaagggtgctataaacaccagcctcccatttcagaatatacatccgatcacaattggaaaatgtccaaaatatgtaaaaagcacaaaattgagactggccacaggattgaggaatgtcccgtctattcaatctagaggcctatttggggccattgccggtttcattgaaggggggtggacagggatggtagatggatggtacggttatcaccatcaaaatgagcaggggtcaggatatgcagccgacctgaagagcacacagaatgccattgacgagattactaacaaagtaaattctgttattgaaaagatgaatacacagttcacagcagtaggtaaagagttcaaccacctggaaaaaagaatagagaatttaaataaaaaggttgatgatggtttcctggacatttggacttacaatgccgaactgttggttctattggaaaatgaaagaactttggactaccacgattcagatgtgaagaacttatatgaaaaggtaagaagccagttaaaaaacaatgccaaggaaattggaaacggctgctttgaattttaccacaaatgcgataacacgtgcatggaaagtgtcaaaaatgggacttatgactacccaaaatactcagaggaagcaaaattaaacagagaagaaatagatggggtaaagctggaatcaacaaggatttaccagattttggcgatctattcaactgtcgccagttcattggtactggtagtctccctgggggcaatcagtttctggatgtgctctaatgggtctctacagtgtagaatatgtatttgatgaacacgtgggatccagatctgctgtgccttctagttgccagccatctgttgtttgcccctcccccgtgccttccttgaccctggaaggtgccactcccactgtcctttcctaataaaatgaggaaattgcatcgcattgtctgagtaggtgtcattctattctggggggtggggtggggcaggacagcaagggggaggattgggaagacaatagcaggcatgctggggatgcggtgggctctatgggtacccaggtgctgaagaattgacccggttcctcctgggccagaaagaagcaggcacatccccttctctgtgacacaccctgtccacgcccctggttcttagttccagccccactcataggacactcatagctcaggagggctccgccttcaatcccacccgctaaagtacttggagcggtctctccctccctcatcagcccaccaaaccaaacctagcctccaagagtgggaagaaattaaagcaagataggctattaagtgcagagggagagaaaatgcctccaacatgtgaggaagtaatgagagaaatcatagaattttaaggccatgatttaaggccatcatggccttaatcttccgcttcctcgctcactgactcgctgcgctcggtcgttcggctgcggcgagcggtatcagctcactcaaaggcggtaatacggttatccacagaatcaggggataacgcaggaaagaacatgtgagcaaaaggccagcaaaaggccaggaaccgtaaaaaggccgcgttgctggcgtttttccataggctccgcccccctgacgagcatcacaaaaatcgacgctcaagtcagaggtggcgaaacccgacaggactataaagataccaggcgtttccccctggaagctccctcgtgcgctctcctgttccgaccctgccgcttaccggatacctgtccgcctttctcccttcgggaagcgtggcgctttctcatagctcacgctgtaggtatctcagttcggtgtaggtcgttcgctccaagctgggctgtgtgcacgaaccccccgttcagcccgaccgctgcgccttatccggtaactatcgtcttgagtccaacccggtaagacacgacttatcgccactggcagcagccactggtaacaggattagcagagcgaggtatgtaggcggtgctacagagttcttgaagtggtggcctaactacggctacactagaagaacagtatttggtatctgcgctctgctgaagccagttaccttcggaaaaagagttggtagctcttgatccggcaaacaaaccaccgctggtagcggtggtttttttgtttgcaagcagcagattacgcgcagaaaaaaaggatctcaagaagatcctttgatcttttctacggggtctgacgctcagtggaacgaaaactcacgttaagggattttggtcatgagattatcaaaaaggatcttcacctagatccttttaaattaaaaatgaagttttaaatcaatctaaagtatatatgagtaaacttggtctgacagttaccaatgcttaatcagtgaggcacctatctcagcgatctgtctatttcgttcatccatagttgcctgactcggggggggggggcgctgaggtctgcctcgtgaagaaggtgttgctgactcataccaggcctgaatcgccccatcatccagccagaaagtgagggagccacggttgatgagagctttgttgtaggtggaccagttggtgattttgaacttttgctttgccacggaacggtctgcgttgtcgggaagatgcgtgatctgatccttcaactcagcaaaagttcgatttattcaacaaagccgccgtcccgtcaagtcagcgtaatgctctgccagtgttacaaccaattaaccaattctgattagaaaaactcatcgagcatcaaatgaaactgcaatttattcatatcaggattatcaataccatatttttgaaaaagccgtttctgtaatgaaggagaaaactcaccgaggcagttccataggatggcaagatcctggtatcggtctgcgattccgactcgtccaacatcaatacaacctattaatttcccctcgtcaaaaataaggttatcaagtgagaaatcaccatgagtgacgactgaatccggtgagaatggcaaaagcttatgcatttctttccagacttgttcaacaggccagccattacgctcgtcatcaaaatcactcgcatcaaccaaaccgttattcattcgtgattgcgcctgagcgagacgaaatacgcgatcgctgttaaaaggacaattacaaacaggaatcgaatgcaaccggcgcaggaacactgccagcgcatcaacaatattttcacctgaatcaggatattcttctaatacctggaatgctgttttcccggggatcgcagtggtgagtaaccatgcatcatcaggagtacggataaaatgcttgatggtcggaagaggcataaattccgtcagccagtttagtctgaccatctcatctgtaacatcattggcaacgctacctttgccatgtttcagaaacaactctggcgcatcgggcttcccatacaatcgatagattgtcgcacctgattgcccgacattatcgcgagcccatttatacccatataaatcagcatccatgttggaatttaatcgcggcctcgagcaagacgtttcccgttgaatatggctcataacaccccttgtattactgtttatgtaagcagacagttttattgttcatgatgatatatttttatcttgtgcaatgtaacatcagagattttgagacacaacgtggctttccccccccccccattattgaagcatttatcagggttattgtctcatgagcggatacatatttgaatgtatttagaaaaataaacaaataggggttccgcgcacatttccccgaaaagtgccacctgacgtctaagaaaccattattatcatgacattaacctataaaaataggcgtatcacgaggccctttcgtc

SEQ ID NO: 92 - DNA, 1701 bp, Influenza A virus
atgaaggcaatactagtagttctgctatatacatttgcaaccgcaaatgcagacacattatgtataggttatcatgcgaacaattcaacagacactgtagacacagtactagaaaagaatgtaacagtaacacactctgttaaccttctagaagacaagcataacgggaaactatgcaaactaagaggggtagccccattgcatttgggtaaatgtaacattgctggctggatcctgggaaatccagagtgtgaatcactctccacagcaagctcatggtcctacattgtggaaacatctagttcaaacaatggaacgtgttacccaggagatttcatcgattatgaggagctaagagagcaattgagctcagtgtcatcatttgaaaggtttgagatattccccaagacaagttcatggcccaatcatgactcgaacaaaggtgtaacggcagcatgtcctcatgctggagcaaaaagcttctacaaaaatttaatatggctagttaaaaaagaaaattcatacccaaagctcaacaaatcctatattaatgataaagggaaagaagtcctcgtgctatggggcattcaccatccatctactagtgctgaccaacaaagtctctatcagaatgcagatgcatatgtttttgtggggacatcaagatacagcaagaagttcaagccggaaatagcaataagacccaaagtgaggggtcaagaagggagaatgaactattactggacactagtagagccgggagacaaaataacattcgaagcaactggaaatctagtggtaccgagatatgcattcgcaatggaaagaaatgctggatctggtattatcatttcagatacaccagtccacgattgcaatacaacttgtcagacacccaagggtgctataaacaccagcctcccatttcagaatatacatccgatcacaattggaaaatgtccaaaatatgtaaaaagcacaaaattgagactggccacaggattgaggaatgtcccgtctattcaatctagaggcctatttggggccattgccggtttcattgaaggggggtggacagggatggtagatggatggtacggttatcaccatcaaaatgagcaggggtcaggatatgcagccgacctgaagagcacacagaatgccattgacgagattactaacaaagtaaattctgttattgaaaagatgaatacacagttcacagcagtaggtaaagagttcaaccacctggaaaaaagaatagagaatttaaataaaaaggttgatgatggtttcctggacatttggacttacaatgccgaactgttggttctattggaaaatgaaagaactttggactaccacgattcagatgtgaagaacttatatgaaaaggtaagaagccagttaaaaaacaatgccaaggaaattggaaacggctgctttgaattttaccacaaatgcgataacacgtgcatggaaagtgtcaaaaatgggacttatgactacccaaaatactcagaggaagcaaaattaaacagagaagaaatagatggggtaaagctggaatcaacaaggatttaccagattttggcgatctattcaactgtcgccagttcattggtactggtagtctccctgggggcaatcagtttctggatgtgctctaatgggtctctacagtgtagaatatgtatttga

SEQ ID NO: 93 - protein, 566 aa, Influenza A virus
MKAILVVLLYTFATANADTLCIGYHANNSTDTVDTVLEKNVTVTHSVNLLEDKHNGKLCKLRGVAPLHLGKCNIAGWILGNPECESLSTASSWSYIVETSSSNNGTCYPGDFIDYEELREQLSSVSSFERFEIFPKTSSWPNHDSNKGVTAACPHAGAKSFYKNLIWLVKKENSYPKLNKSYINDKGKEVLVLWGIHHPSTSADQQSLYQNADAYVFVGTSRYSKKFKPEIAIRPKVRGQEGRMNYYWTLVEPGDKITFEATGNLVVPRYAFAMERNAGSGIIISDTPVHDCNTTCQTPKGAINTSLPFQNIHPITIGKCPKYVKSTKLRLATGLRNVPSIQSRGLFGAIAGFIEGGWTGMVDGWYGYHHQNEQGSGYAADLKSTQNAIDEITNKVNSVIEKMNTQFTAVGKEFNHLEKRIENLNKKVDDGFLDIWTYNAELLVLLENERTLDYHDSDVKNLYEKVRSQLKNNAKEIGNGCFEFYHKCDNTCMESVKNGTYDYPKYSEEAKLNREEIDGVKLESTRIYQILAIYSTVASSLVLVVSLGAISFWMCSNGSLQCRICI

SEQ ID NO: 94 - DNA, 1701 bp, Influenza A virus
tcaaatacatattctacactgtagagacccattagagcacatccagaaactgattgcccccagggagactaccagtaccaatgaactggcgacagttgaatagatcgccaaaatctggtaaatccttgttgattccagctttaccccatctatttcttctctgtttaattttgcttcctctgagtattttgggtagtcataagtcccatttttgacactttccatgcacgtgttatcgcatttgtggtaaaattcaaagcagccgtttccaatttccttggcattgttttttaactggcttcttaccttttcatataagttcttcacatctgaatcgtggtagtccaaagttctttcattttccaatagaaccaacagttcggcattgtaagtccaaatgtccaggaaaccatcatcaacctttttatttaaattctctattcttttttccaggtggttgaactctttacctactgctgtgaactgtgtattcatcttttcaataacagaatttactttgttagtaatctcgtcaatggcattctgtgtgctcttcaggtcggctgcatatcctgacccctgctcattttgatggtgataaccgtaccatccatctaccatccctgtccaccccccttcaatgaaaccggcaatggccccaaataggcctctagattgaatagacgggacattcctcaatcctgtggccagtctcaattttgtgctttttacatattttggacattttccaattgtgatcggatgtatattctgaaatgggaggctggtgtttatagcacccttgggtgtctgacaagttgtattgcaatcgtggactggtgtatctgaaatgataataccagatccagcatttctttccattgcgaatgcatatctcggtaccactagatttccagttgcttcgaatgttattttgtctcccggctctactagtgtccagtaatagttcattctcccttcttgacccctcactttgggtcttattgctatttccggcttgaacttcttgctgtatcttgatgtccccacaaaaacatatgcatctgcattctgatagagactttgttggtcagcactagtagatggatggtgaatgccccatagcacgaggacttctttccctttatcattaatataggatttgttgagctttgggtatgaattttcttttttaactagccatattaaatttttgtagaagctttttgctccagcatgaggacatgctgccgttacacctttgttcgagtcatgattgggccatgaacttgtcttggggaatatctcaaacctttcaaatgatgacactgagctcaattgctctcttagctcctcataatcgatgaaatctcctgggtaacacgttccattgtttgaactagatgtttccacaatgtaggaccatgagcttgctgtggagagtgattcacactctggatttcccaggatccagccagcaatgttacatttacccaaatgcaatggggctacccctcttagtttgcatagtttcccgttatgcttgtcttctagaaggttaacagagtgtgttactgttacattcttttctagtactgtgtctacagtgtctgttgaattgttcgcatgataacctatacataatgtgtctgcatttgcggttgcaaatgtatatagcagaactactagtattgccttcat

SEQ ID NO: 95 - DNA, 6128 bp, Influenza A virus
tcgcgcgtttcggtgatgacggtgaaaacctctgacacatgcagctcccggagacggtcacagcttgtctgtaagcggatgccgggagcagacaagcccgtcagggcgcgtcagcgggtgttggcgggtgtcggggctggcttaactatgcggcatcagagcagattgtactgagagtgcaccatatgcggtgtgaaataccgcacagatgcgtaaggagaaaataccgcatcagattggctattggccattgcatacgttgtatccatatcataatatgtacatttatattggctcatgtccaacattaccgccatgttgacattgattattgactagttattaatagtaatcaattacggggtcattagttcatagcccatatatggagttccgcgttacataacttacggtaaatggcccgcctggctgaccgcccaacgacccccgcccattgacgtcaataatgacgtatgttcccatagtaacgccaatagggactttccattgacgtcaatgggtggagtatttacggtaaactgcccacttggcagtacatcaagtgtatcatatgccaagtacgccccctattgacgtcaatgacggtaaatggcccgcctggcattatgcccagtacatgaccttatgggactttcctacttggcagtacatctacgtattagtcatcgctattaccatggtgatgcggttttggcagtacatcaatgggcgtggatagcggtttgactcacggggatttccaagtctccaccccattgacgtcaatgggagtttgttttggcaccaaaatcaacgggactttccaaaatgtcgtaacaactccgccccattgacgcaaatgggcggtaggcgtgtacggtgggaggtctatataagcagagctcgtttagtgaaccgtcagatcgcctggagacgccatccacgctgttttgacctccatagaagacaccgggaccgatccagcctccatcggctcgcatctctccttcacgcgcccgccgccctacctgaggccgccatccacgccggttgagtcgcgttctgccgcctcccgcctgtggtgcctcctgaactgcgtccgccgtctaggtaagtttaaagctcaggtcgagaccgggcctttgtccggcgctcccttggagcctacctagactcagccggctctccacgctttgcctgaccctgcttgctcaactctagttaacggtggagggcagtgtagtctgagcagtactcgttgctgccgcgcgcgccaccagacataatagctgacagactaacagactgttcctttccatgggtcttttctgcagtcaccgtcgtcgacacgtgtgatcagatatcgcggccgctctagagatatcgccaccatgaaggcaatactagtagttctgctatatacatttgcaaccgcaaatgcagacacattatgtataggttatcatgcgaacaattcaacagacactgtagacacagtactagaaaagaatgtaacagtaacacactctgttaaccttctagaagacaagcataacgggaaactatgcaaactaagaggggtagccccattgcatttgggtaaatgtaacattgctggctggatcctgggaaatccagagtgtgaatcactctccacagcaagctcatggtcctacattgtggaaacatctagttcagacaatggaacgtgttacccaggagatttcatcgattatgaggagctaagagagcaattgagctcagtgtcatcatttgaaaggtttgagatattccccaagacaagttcatggcccaatcatgactcgaacaaaggtgtaacggcagcatgttctcatgctggagcaaaaagcttctacaaaaatttaatatggctagttaaaaaaggaaattcatacccaaagctcaacaaatcctacattaatgataaagggaaagaagtcctcgtgctatggggcattcaccatccatctactagtgctgaccaacaaagtctctatcagaatgcagatgcatatgtttttgtggggacatcaagatacagcaagaagttcaagccggaaatagcaataagacccaaagtgagggaacaagaagggagaatgaactattactggacactagtagagccgggagacaaaataacattcgaagcaactggaaatctagtggtaccgagatatgcattcgcaatggaaagaaatgctggatctggtattatcatttcagatacaccagtccacgattgcaatacaacttgtcagacacccaagggtgctataaacaccagcctcccatttcagaatatacatccgatcacaattggaaaatgtccaaaatatgtaaaaagcacaaaattgagactggccacaggattgaggaatgtcccatctattcaatctagaggcctatttggggccattgccggtttcattgaaggggggtggacagggatggtagatggatggtacggttatcaccatcaaaatgagcaggggtcaggatatgcagccgacctgaagagcacacagaatgccattgacgagattactaacaaagtaaattctgttattgaaaagatgaatacacagttcacagcagtaggtaaagagttcaaccacctggaaaaaagaatagagaatttaaataaaaaagttgatgatggtttcctggacatttggacttacaatgccgaactgttggttctattggaaaatgaaagaactttggactaccacgattcaaatgtgaagaacttatacgaaaaggtaagaagccagttaaaaaacaatgccaaggaaattggaaacggctgctttgaattttaccacaaatgcgataacacgtgcatggaaagtgtcaaaaatgggacttatgactacccaaaatactcagaggaagcaaaattaaacagagaagaaatagatggggtaaagctggaatcaacaaggatttaccagattttggcgatctattcaactgtcgccagttcattggtactggtagtctccctgggggcaatcagtttctggatgtgctctaatgggtctctacagtgtagaatatgtatttgatgaacacgtgggatccagatctgctgtgccttctagttgccagccatctgttgtttgcccctcccccgtgccttccttgaccctggaaggtgccactcccactgtcctttcctaataaaatgaggaaattgcatcgcattgtctgagtaggtgtcattctattctggggggtggggtggggcaggacagcaagggggaggattgggaagacaatagcaggcatgctggggatgcggtgggctctatgggtacccaggtgctgaagaattgacccggttcctcctgggccagaaagaagcaggcacatccccttctctgtgacacaccctgtccacgcccctggttcttagttccagccccactcataggacactcatagctcaggagggctccgccttcaatcccacccgctaaagtacttggagcggtctctccctccctcatcagcccaccaaaccaaacctagcctccaagagtgggaagaaattaaagcaagataggctattaagtgcagagggagagaaaatgcctccaacatgtgaggaagtaatgagagaaatcatagaattttaaggccatgatttaaggccatcatggccttaatcttccgcttcctcgctcactgactcgctgcgctcggtcgttcggctgcggcgagcggtatcagctcactcaaaggcggtaatacggttatccacagaatcaggggataacgcaggaaagaacatgtgagcaaaaggccagcaaaaggccaggaaccgtaaaaaggccgcgttgctggcgtttttccataggctccgcccccctgacgagcatcacaaaaatcgacgctcaagtcagaggtggcgaaacccgacaggactataaagataccaggcgtttccccctggaagctccctcgtgcgctctcctgttccgaccctgccgcttaccggatacctgtccgcctttctcccttcgggaagcgtggcgctttctcatagctcacgctgtaggtatctcagttcggtgtaggtcgttcgctccaagctgggctgtgtgcacgaaccccccgttcagcccgaccgctgcgccttatccggtaactatcgtcttgagtccaacccggtaagacacgacttatcgccactggcagcagccactggtaacaggattagcagagcgaggtatgtaggcggtgctacagagttcttgaagtggtggcctaactacggctacactagaagaacagtatttggtatctgcgctctgctgaagccagttaccttcggaaaaagagttggtagctcttgatccggcaaacaaaccaccgctggtagcggtggtttttttgtttgcaagcagcagattacgcgcagaaaaaaaggatctcaagaagatcctttgatcttttctacggggtctgacgctcagtggaacgaaaactcacgttaagggattttggtcatgagattatcaaaaaggatcttcacctagatccttttaaattaaaaatgaagttttaaatcaatctaaagtatatatgagtaaacttggtctgacagttaccaatgcttaatcagtgaggcacctatctcagcgatctgtctatttcgttcatccatagttgcctgactcggggggggggggcgctgaggtctgcctcgtgaagaaggtgttgctgactcataccaggcctgaatcgccccatcatccagccagaaagtgagggagccacggttgatgagagctttgttgtaggtggaccagttggtgattttgaacttttgctttgccacggaacggtctgcgttgtcgggaagatgcgtgatctgatccttcaactcagcaaaagttcgatttattcaacaaagccgccgtcccgtcaagtcagcgtaatgctctgccagtgttacaaccaattaaccaattctgattagaaaaactcatcgagcatcaaatgaaactgcaatttattcatatcaggattatcaataccatatttttgaaaaagccgtttctgtaatgaaggagaaaactcaccgaggcagttccataggatggcaagatcctggtatcggtctgcgattccgactcgtccaacatcaatacaacctattaatttcccctcgtcaaaaataaggttatcaagtgagaaatcaccatgagtgacgactgaatccggtgagaatggcaaaagcttatgcatttctttccagacttgttcaacaggccagccattacgctcgtcatcaaaatcactcgcatcaaccaaaccgttattcattcgtgattgcgcctgagcgagacgaaatacgcgatcgctgttaaaaggacaattacaaacaggaatcgaatgcaaccggcgcaggaacactgccagcgcatcaacaatattttcacctgaatcaggatattcttctaatacctggaatgctgttttcccggggatcgcagtggtgagtaaccatgcatcatcaggagtacggataaaatgcttgatggtcggaagaggcataaattccgtcagccagtttagtctgaccatctcatctgtaacatcattggcaacgctacctttgccatgtttcagaaacaactctggcgcatcgggcttcccatacaatcgatagattgtcgcacctgattgcccgacattatcgcgagcccatttatacccatataaatcagcatccatgttggaatttaatcgcggcctcgagcaagacgtttcccgttgaatatggctcataacaccccttgtattactgtttatgtaagcagacagttttattgttcatgatgatatatttttatcttgtgcaatgtaacatcagagattttgagacacaacgtggctttccccccccccccattattgaagcatttatcagggttattgtctcatgagcggatacatatttgaatgtatttagaaaaataaacaaataggggttccgcgcacatttccccgaaaagtgccacctgacgtctaagaaaccattattatcatgacattaacctataaaaataggcgtatcacgaggccctttcgtc

SEQ ID NO: 96 - DNA, 1701 bp, Influenza A virus
atgaaggcaatactagtagttctgctatatacatttgcaaccgcaaatgcagacacattatgtataggttatcatgcgaacaattcaacagacactgtagacacagtactagaaaagaatgtaacagtaacacactctgttaaccttctagaagacaagcataacgggaaactatgcaaactaagaggggtagccccattgcatttgggtaaatgtaacattgctggctggatcctgggaaatccagagtgtgaatcactctccacagcaagctcatggtcctacattgtggaaacatctagttcagacaatggaacgtgttacccaggagatttcatcgattatgaggagctaagagagcaattgagctcagtgtcatcatttgaaaggtttgagatattccccaagacaagttcatggcccaatcatgactcgaacaaaggtgtaacggcagcatgttctcatgctggagcaaaaagcttctacaaaaatttaatatggctagttaaaaaaggaaattcatacccaaagctcaacaaatcctacattaatgataaagggaaagaagtcctcgtgctatggggcattcaccatccatctactagtgctgaccaacaaagtctctatcagaatgcagatgcatatgtttttgtggggacatcaagatacagcaagaagttcaagccggaaatagcaataagacccaaagtgagggaacaagaagggagaatgaactattactggacactagtagagccgggagacaaaataacattcgaagcaactggaaatctagtggtaccgagatatgcattcgcaatggaaagaaatgctggatctggtattatcatttcagatacaccagtccacgattgcaatacaacttgtcagacacccaagggtgctataaacaccagcctcccatttcagaatatacatccgatcacaattggaaaatgtccaaaatatgtaaaaagcacaaaattgagactggccacaggattgaggaatgtcccatctattcaatctagaggcctatttggggccattgccggtttcattgaaggggggtggacagggatggtagatggatggtacggttatcaccatcaaaatgagcaggggtcaggatatgcagccgacctgaagagcacacagaatgccattgacgagattactaacaaagtaaattctgttattgaaaagatgaatacacagttcacagcagtaggtaaagagttcaaccacctggaaaaaagaatagagaatttaaataaaaaagttgatgatggtttcctggacatttggacttacaatgccgaactgttggttctattggaaaatgaaagaactttggactaccacgattcaaatgtgaagaacttatacgaaaaggtaagaagccagttaaaaaacaatgccaaggaaattggaaacggctgctttgaattttaccacaaatgcgataacacgtgcatggaaagtgtcaaaaatgggacttatgactacccaaaatactcagaggaagcaaaattaaacagagaagaaatagatggggtaaagctggaatcaacaaggatttaccagattttggcgatctattcaactgtcgccagttcattggtactggtagtctccctgggggcaatcagtttctggatgtgctctaatgggtctctacagtgtagaatatgtatttga

SEQ ID NO: 97 - protein, 566 aa, Influenza A virus
MKAILVVLLYTFATANADTLCIGYHANNSTDTVDTVLEKNVTVTHSVNLLEDKHNGKLCKLRGVAPLHLGKCNIAGWILGNPECESLSTASSWSYIVETSSSDNGTCYPGDFIDYEELREQLSSVSSFERFEIFPKTSSWPNHDSNKGVTAACSHAGAKSFYKNLIWLVKKGNSYPKLNKSYINDKGKEVLVLWGIHHPSTSADQQSLYQNADAYVFVGTSRYSKKFKPEIAIRPKVREQEGRMNYYWTLVEPGDKITFEATGNLVVPRYAFAMERNAGSGIIISDTPVHDCNTTCQTPKGAINTSLPFQNIHPITIGKCPKYVKSTKLRLATGLRNVPSIQSRGLFGAIAGFIEGGWTGMVDGWYGYHHQNEQGSGYAADLKSTQNAIDEITNKVNSVIEKMNTQFTAVGKEFNHLEKRIENLNKKVDDGFLDIWTYNAELLVLLENERTLDYHDSNVKNLYEKVRSQLKNNAKEIGNGCFEFYHKCDNTCMESVKNGTYDYPKYSEEAKLNREEIDGVKLESTRIYQILAIYSTVASSLVLVVSLGAISFWMCSNGSLQCRICI

SEQ ID NO: 98 - DNA, 1701 bp, Influenza A virus
tcaaatacatattctacactgtagagacccattagagcacatccagaaactgattgcccccagggagactaccagtaccaatgaactggcgacagttgaatagatcgccaaaatctggtaaatccttgttgattccagctttaccccatctatttcttctctgtttaattttgcttcctctgagtattttgggtagtcataagtcccatttttgacactttccatgcacgtgttatcgcatttgtggtaaaattcaaagcagccgtttccaatttccttggcattgttttttaactggcttcttaccttttcgtataagttcttcacatttgaatcgtggtagtccaaagttctttcattttccaatagaaccaacagttcggcattgtaagtccaaatgtccaggaaaccatcatcaacttttttatttaaattctctattcttttttccaggtggttgaactctttacctactgctgtgaactgtgtattcatcttttcaataacagaatttactttgttagtaatctcgtcaatggcattctgtgtgctcttcaggtcggctgcatatcctgacccctgctcattttgatggtgataaccgtaccatccatctaccatccctgtccaccccccttcaatgaaaccggcaatggccccaaataggcctctagattgaatagatgggacattcctcaatcctgtggccagtctcaattttgtgctttttacatattttggacattttccaattgtgatcggatgtatattctgaaatgggaggctggtgtttatagcacccttgggtgtctgacaagttgtattgcaatcgtggactggtgtatctgaaatgataataccagatccagcatttctttccattgcgaatgcatatctcggtaccactagatttccagttgcttcgaatgttattttgtctcccggctctactagtgtccagtaatagttcattctcccttcttgttccctcactttgggtcttattgctatttccggcttgaacttcttgctgtatcttgatgtccccacaaaaacatatgcatctgcattctgatagagactttgttggtcagcactagtagatggatggtgaatgccccatagcacgaggacttctttccctttatcattaatgtaggatttgttgagctttgggtatgaatttccttttttaactagccatattaaatttttgtagaagctttttgctccagcatgagaacatgctgccgttacacctttgttcgagtcatgattgggccatgaacttgtcttggggaatatctcaaacctttcaaatgatgacactgagctcaattgctctcttagctcctcataatcgatgaaatctcctgggtaacacgttccattgtctgaactagatgtttccacaatgtaggaccatgagcttgctgtggagagtgattcacactctggatttcccaggatccagccagcaatgttacatttacccaaatgcaatggggctacccctcttagtttgcatagtttcccgttatgcttgtcttctagaaggttaacagagtgtgttactgttacattcttttctagtactgtgtctacagtgtctgttgaattgttcgcatgataacctatacataatgtgtctgcatttgcggttgcaaatgtatatagcagaactactagtattgccttcat

SEQ ID NO: 99 - DNA, 6128 bp, Influenza A virus
tcgcgcgtttcggtgatgacggtgaaaacctctgacacatgcagctcccggagacggtcacagcttgtctgtaagcggatgccgggagcagacaagcccgtcagggcgcgtcagcgggtgttggcgggtgtcggggctggcttaactatgcggcatcagagcagattgtactgagagtgcaccatatgcggtgtgaaataccgcacagatgcgtaaggagaaaataccgcatcagattggctattggccattgcatacgttgtatccatatcataatatgtacatttatattggctcatgtccaacattaccgccatgttgacattgattattgactagttattaatagtaatcaattacggggtcattagttcatagcccatatatggagttccgcgttacataacttacggtaaatggcccgcctggctgaccgcccaacgacccccgcccattgacgtcaataatgacgtatgttcccatagtaacgccaatagggactttccattgacgtcaatgggtggagtatttacggtaaactgcccacttggcagtacatcaagtgtatcatatgccaagtacgccccctattgacgtcaatgacggtaaatggcccgcctggcattatgcccagtacatgaccttatgggactttcctacttggcagtacatctacgtattagtcatcgctattaccatggtgatgcggttttggcagtacatcaatgggcgtggatagcggtttgactcacggggatttccaagtctccaccccattgacgtcaatgggagtttgttttggcaccaaaatcaacgggactttccaaaatgtcgtaacaactccgccccattgacgcaaatgggcggtaggcgtgtacggtgggaggtctatataagcagagctcgtttagtgaaccgtcagatcgcctggagacgccatccacgctgttttgacctccatagaagacaccgggaccgatccagcctccatcggctcgcatctctccttcacgcgcccgccgccctacctgaggccgccatccacgccggttgagtcgcgttctgccgcctcccgcctgtggtgcctcctgaactgcgtccgccgtctaggtaagtttaaagctcaggtcgagaccgggcctttgtccggcgctcccttggagcctacctagactcagccggctctccacgctttgcctgaccctgcttgctcaactctagttaacggtggagggcagtgtagtctgagcagtactcgttgctgccgcgcgcgccaccagacataatagctgacagactaacagactgttcctttccatgggtcttttctgcagtcaccgtcgtcgacacgtgtgatcagatatcgcggccgctctagagatatcgccaccatgaaggcaatactagtagttctgctatatacatttgcaaccgcaaatgcagacacattatgtataggttatcatgcgaacaattcaacagacactgtagacacagtactagaaaagaatgtaacagtaacacactctgttaaccttctagaaaacaagcataacgggaaactatgcaaactaagaggggtagccccattgcatttgggtaaatgtaacattgctggctggatcctgggaaatccagagtgtgaatcattctccacatcaagctcatggtcctacattgtggaaacatctagttcagacaatggaacgtgttacccaggagatttcatcgattatgaggagctaagagagcaattgagctcagtgtcatcatttgaaaggtttgagatattccccaagacaagttcatggcccaatcatgactcgaacaaaggtgtaacggcagcatgtcctcatgctggagcaaaaagcttctacaaaaatttaatatggctagttaaaaaaggaaattcatacccaaagctcaacaaatcctacattaatgataaagggaaagaagtcctcgtgctatggggcattcaccatccatctactagtgctgaccaacaaagtctctatcagaatgcagatgcatatgtttttgtggggacatcaagatacagcaagaagttcaagccggaaatagcaataagacccaaagtgagggatcaagaagggagaatgaactattactggacactagtagagccgggagacaaaataacattcgaagcaactggaaatctagtggtaccgagatatgcattcgcaatggaaagaaatgctggatctggtattatcatttcagatacaccagtccacgattgcaatacaacttgtcagacacccaagggtgctataaacaccagcctcccatttcagaatatacatccgatcacaattggaaaatgtccaaaatatgtaaaaagcacaaaattgagactggccacaggattgaggaatgtcccgtctattcaatctagaggcctatttggggccattgccggtttcattgaaggggggtggacagggatggtagatggatggtacggttatcaccatcaaaatgagcaggggtcaggatatgcagccgacctgaagagcacacagaatgccattgacgggattactaacaaagtaaattctgttattgaaaagatgaatacacagttcacagcagtaggtaaagagttcaaccacctggaaaaaagaatagagaatttaaataaaaaagttgatgatggtttcctggacatttggacttacaatgccgaactgttggttctattggaaaatgaaagaactttggactaccacgattcaaatgtgaagaacttatatgaaaaggtaagaagccagttaaaaaacaatgccaaggaaattggaaacggctgctttgaattttaccacaaatgcgataacacgtgcatggaaagtgtcaaaaatgggacttatgactacccaaaatactcagaggaagcaaaattaaacagagaagaaatagatggggtaaagctggaatcaacaaggatttaccagattttggcgatctattcaactgtcgccagttcattggtactggtagtctccctgggggcaatcagtttctggatgtgctctaatgggtctctacagtgtagaatatgtatttgatgaacacgtgggatccagatctgctgtgccttctagttgccagccatctgttgtttgcccctcccccgtgccttccttgaccctggaaggtgccactcccactgtcctttcctaataaaatgaggaaattgcatcgcattgtctgagtaggtgtcattctattctggggggtggggtggggcaggacagcaagggggaggattgggaagacaatagcaggcatgctggggatgcggtgggctctatgggtacccaggtgctgaagaattgacccggttcctcctgggccagaaagaagcaggcacatccccttctctgtgacacaccctgtccacgcccctggttcttagttccagccccactcataggacactcatagctcaggagggctccgccttcaatcccacccgctaaagtacttggagcggtctctccctccctcatcagcccaccaaaccaaacctagcctccaagagtgggaagaaattaaagcaagataggctattaagtgcagagggagagaaaatgcctccaacatgtgaggaagtaatgagagaaatcatagaattttaaggccatgatttaaggccatcatggccttaatcttccgcttcctcgctcactgactcgctgcgctcggtcgttcggctgcggcgagcggtatcagctcactcaaaggcggtaatacggttatccacagaatcaggggataacgcaggaaagaacatgtgagcaaaaggccagcaaaaggccaggaaccgtaaaaaggccgcgttgctggcgtttttccataggctccgcccccctgacgagcatcacaaaaatcgacgctcaagtcagaggtggcgaaacccgacaggactataaagataccaggcgtttccccctggaagctccctcgtgcgctctcctgttccgaccctgccgcttaccggatacctgtccgcctttctcccttcgggaagcgtggcgctttctcatagctcacgctgtaggtatctcagttcggtgtaggtcgttcgctccaagctgggctgtgtgcacgaaccccccgttcagcccgaccgctgcgccttatccggtaactatcgtcttgagtccaacccggtaagacacgacttatcgccactggcagcagccactggtaacaggattagcagagcgaggtatgtaggcggtgctacagagttcttgaagtggtggcctaactacggctacactagaagaacagtatttggtatctgcgctctgctgaagccagttaccttcggaaaaagagttggtagctcttgatccggcaaacaaaccaccgctggtagcggtggtttttttgtttgcaagcagcagattacgcgcagaaaaaaaggatctcaagaagatcctttgatcttttctacggggtctgacgctcagtggaacgaaaactcacgttaagggattttggtcatgagattatcaaaaaggatcttcacctagatccttttaaattaaaaatgaagttttaaatcaatctaaagtatatatgagtaaacttggtctgacagttaccaatgcttaatcagtgaggcacctatctcagcgatctgtctatttcgttcatccatagttgcctgactcggggggggggggcgctgaggtctgcctcgtgaagaaggtgttgctgactcataccaggcctgaatcgccccatcatccagccagaaagtgagggagccacggttgatgagagctttgttgtaggtggaccagttggtgattttgaacttttgctttgccacggaacggtctgcgttgtcgggaagatgcgtgatctgatccttcaactcagcaaaagttcgatttattcaacaaagccgccgtcccgtcaagtcagcgtaatgctctgccagtgttacaaccaattaaccaattctgattagaaaaactcatcgagcatcaaatgaaactgcaatttattcatatcaggattatcaataccatatttttgaaaaagccgtttctgtaatgaaggagaaaactcaccgaggcagttccataggatggcaagatcctggtatcggtctgcgattccgactcgtccaacatcaatacaacctattaatttcccctcgtcaaaaataaggttatcaagtgagaaatcaccatgagtgacgactgaatccggtgagaatggcaaaagcttatgcatttctttccagacttgttcaacaggccagccattacgctcgtcatcaaaatcactcgcatcaaccaaaccgttattcattcgtgattgcgcctgagcgagacgaaatacgcgatcgctgttaaaaggacaattacaaacaggaatcgaatgcaaccggcgcaggaacactgccagcgcatcaacaatattttcacctgaatcaggatattcttctaatacctggaatgctgttttcccggggatcgcagtggtgagtaaccatgcatcatcaggagtacggataaaatgcttgatggtcggaagaggcataaattccgtcagccagtttagtctgaccatctcatctgtaacatcattggcaacgctacctttgccatgtttcagaaacaactctggcgcatcgggcttcccatacaatcgatagattgtcgcacctgattgcccgacattatcgcgagcccatttatacccatataaatcagcatccatgttggaatttaatcgcggcctcgagcaagacgtttcccgttgaatatggctcataacaccccttgtattactgtttatgtaagcagacagttttattgttcatgatgatatatttttatcttgtgcaatgtaacatcagagattttgagacacaacgtggctttccccccccccccattattgaagcatttatcagggttattgtctcatgagcggatacatatttgaatgtatttagaaaaataaacaaataggggttccgcgcacatttccccgaaaagtgccacctgacgtctaagaaaccattattatcatgacattaacctataaaaataggcgtatcacgaggccctttcgtc

SEQ ID NO: 100 - DNA, 1701 bp, Influenza A virus
atgaaggcaatactagtagttctgctatatacatttgcaaccgcaaatgcagacacattatgtataggttatcatgcgaacaattcaacagacactgtagacacagtactagaaaagaatgtaacagtaacacactctgttaaccttctagaaaacaagcataacgggaaactatgcaaactaagaggggtagccccattgcatttgggtaaatgtaacattgctggctggatcctgggaaatccagagtgtgaatcattctccacatcaagctcatggtcctacattgtggaaacatctagttcagacaatggaacgtgttacccaggagatttcatcgattatgaggagctaagagagcaattgagctcagtgtcatcatttgaaaggtttgagatattccccaagacaagttcatggcccaatcatgactcgaacaaaggtgtaacggcagcatgtcctcatgctggagcaaaaagcttctacaaaaatttaatatggctagttaaaaaaggaaattcatacccaaagctcaacaaatcctacattaatgataaagggaaagaagtcctcgtgctatggggcattcaccatccatctactagtgctgaccaacaaagtctctatcagaatgcagatgcatatgtttttgtggggacatcaagatacagcaagaagttcaagccggaaatagcaataagacccaaagtgagggatcaagaagggagaatgaactattactggacactagtagagccgggagacaaaataacattcgaagcaactggaaatctagtggtaccgagatatgcattcgcaatggaaagaaatgctggatctggtattatcatttcagatacaccagtccacgattgcaatacaacttgtcagacacccaagggtgctataaacaccagcctcccatttcagaatatacatccgatcacaattggaaaatgtccaaaatatgtaaaaagcacaaaattgagactggccacaggattgaggaatgtcccgtctattcaatctagaggcctatttggggccattgccggtttcattgaaggggggtggacagggatggtagatggatggtacggttatcaccatcaaaatgagcaggggtcaggatatgcagccgacctgaagagcacacagaatgccattgacgggattactaacaaagtaaattctgttattgaaaagatgaatacacagttcacagcagtaggtaaagagttcaaccacctggaaaaaagaatagagaatttaaataaaaaagttgatgatggtttcctggacatttggacttacaatgccgaactgttggttctattggaaaatgaaagaactttggactaccacgattcaaatgtgaagaacttatatgaaaaggtaagaagccagttaaaaaacaatgccaaggaaattggaaacggctgctttgaattttaccacaaatgcgataacacgtgcatggaaagtgtcaaaaatgggacttatgactacccaaaatactcagaggaagcaaaattaaacagagaagaaatagatggggtaaagctggaatcaacaaggatttaccagattttggcgatctattcaactgtcgccagttcattggtactggtagtctccctgggggcaatcagtttctggatgtgctctaatgggtctctacagtgtagaatatgtatttga

SEQ ID NO: 101 - protein, 566 aa, Influenza A virus
MKAILVVLLYTFATANADTLCIGYHANNSTDTVDTVLEKNVTVTHSVNLLENKHNGKLCKLRGVAPLHLGKCNIAGWILGNPECESFSTSSSWSYIVETSSSDNGTCYPGDFIDYEELREQLSSVSSFERFEIFPKTSSWPNHDSNKGVTAACPHAGAKSFYKNLIWLVKKGNSYPKLNKSYINDKGKEVLVLWGIHHPSTSADQQSLYQNADAYVFVGTSRYSKKFKPEIAIRPKVRDQEGRMNYYWTLVEPGDKITFEATGNLVVPRYAFAMERNAGSGIIISDTPVHDCNTTCQTPKGAINTSLPFQNIHPITIGKCPKYVKSTKLRLATGLRNVPSIQSRGLFGAIAGFIEGGWTGMVDGWYGYHHQNEQGSGYAADLKSTQNAIDGITNKVNSVIEKMNTQFTAVGKEFNHLEKRIENLNKKVDDGFLDIWTYNAELLVLLENERTLDYHDSNVKNLYEKVRSQLKNNAKEIGNGCFEFYHKCDNTCMESVKNGTYDYPKYSEEAKLNREEIDGVKLESTRIYQILAIYSTVASSLVLVVSLGAISFWMCSNGSLQCRICI

SEQ ID NO: 102 - DNA, 1701 bp, Influenza A virus
tcaaatacatattctacactgtagagacccattagagcacatccagaaactgattgcccccagggagactaccagtaccaatgaactggcgacagttgaatagatcgccaaaatctggtaaatccttgttgattccagctttaccccatctatttcttctctgtttaattttgcttcctctgagtattttgggtagtcataagtcccatttttgacactttccatgcacgtgttatcgcatttgtggtaaaattcaaagcagccgtttccaatttccttggcattgttttttaactggcttcttaccttttcatataagttcttcacatttgaatcgtggtagtccaaagttctttcattttccaatagaaccaacagttcggcattgtaagtccaaatgtccaggaaaccatcatcaacttttttatttaaattctctattcttttttccaggtggttgaactctttacctactgctgtgaactgtgtattcatcttttcaataacagaatttactttgttagtaatcccgtcaatggcattctgtgtgctcttcaggtcggctgcatatcctgacccctgctcattttgatggtgataaccgtaccatccatctaccatccctgtccaccccccttcaatgaaaccggcaatggccccaaataggcctctagattgaatagacgggacattcctcaatcctgtggccagtctcaattttgtgctttttacatattttggacattttccaattgtgatcggatgtatattctgaaatgggaggctggtgtttatagcacccttgggtgtctgacaagttgtattgcaatcgtggactggtgtatctgaaatgataataccagatccagcatttctttccattgcgaatgcatatctcggtaccactagatttccagttgcttcgaatgttattttgtctcccggctctactagtgtccagtaatagttcattctcccttcttgatccctcactttgggtcttattgctatttccggcttgaacttcttgctgtatcttgatgtccccacaaaaacatatgcatctgcattctgatagagactttgttggtcagcactagtagatggatggtgaatgccccatagcacgaggacttctttccctttatcattaatgtaggatttgttgagctttgggtatgaatttccttttttaactagccatattaaatttttgtagaagctttttgctccagcatgaggacatgctgccgttacacctttgttcgagtcatgattgggccatgaacttgtcttggggaatatctcaaacctttcaaatgatgacactgagctcaattgctctcttagctcctcataatcgatgaaatctcctgggtaacacgttccattgtctgaactagatgtttccacaatgtaggaccatgagcttgatgtggagaatgattcacactctggatttcccaggatccagccagcaatgttacatttacccaaatgcaatggggctacccctcttagtttgcatagtttcccgttatgcttgttttctagaaggttaacagagtgtgttactgttacattcttttctagtactgtgtctacagtgtctgttgaattgttcgcatgataacctatacataatgtgtctgcatttgcggttgcaaatgtatatagcagaactactagtattgccttcat

SEQ ID NO: 103 - DNA, 6128 bp, Influenza A virus
tcgcgcgtttcggtgatgacggtgaaaacctctgacacatgcagctcccggagacggtcacagcttgtctgtaagcggatgccgggagcagacaagcccgtcagggcgcgtcagcgggtgttggcgggtgtcggggctggcttaactatgcggcatcagagcagattgtactgagagtgcaccatatgcggtgtgaaataccgcacagatgcgtaaggagaaaataccgcatcagattggctattggccattgcatacgttgtatccatatcataatatgtacatttatattggctcatgtccaacattaccgccatgttgacattgattattgactagttattaatagtaatcaattacggggtcattagttcatagcccatatatggagttccgcgttacataacttacggtaaatggcccgcctggctgaccgcccaacgacccccgcccattgacgtcaataatgacgtatgttcccatagtaacgccaatagggactttccattgacgtcaatgggtggagtatttacggtaaactgcccacttggcagtacatcaagtgtatcatatgccaagtacgccccctattgacgtcaatgacggtaaatggcccgcctggcattatgcccagtacatgaccttatgggactttcctacttggcagtacatctacgtattagtcatcgctattaccatggtgatgcggttttggcagtacatcaatgggcgtggatagcggtttgactcacggggatttccaagtctccaccccattgacgtcaatgggagtttgttttggcaccaaaatcaacgggactttccaaaatgtcgtaacaactccgccccattgacgcaaatgggcggtaggcgtgtacggtgggaggtctatataagcagagctcgtttagtgaaccgtcagatcgcctggagacgccatccacgctgttttgacctccatagaagacaccgggaccgatccagcctccatcggctcgcatctctccttcacgcgcccgccgccctacctgaggccgccatccacgccggttgagtcgcgttctgccgcctcccgcctgtggtgcctcctgaactgcgtccgccgtctaggtaagtttaaagctcaggtcgagaccgggcctttgtccggcgctcccttggagcctacctagactcagccggctctccacgctttgcctgaccctgcttgctcaactctagttaacggtggagggcagtgtagtctgagcagtactcgttgctgccgcgcgcgccaccagacataatagctgacagactaacagactgttcctttccatgggtcttttctgcagtcaccgtcgtcgacacgtgtgatcagatatcgcggccgctctagagatatcgccaccatgaaggcaatactagtagttctgctatatacatttgcaaccgcaaatgcagacacattatgtataggttatcatgcgaacaattcaacagacactgtagacacagtactagaaaagaatgtaacagtaacacactctgttaaccttctagaagacaagcataacgggaaactatgcaaactaagaggggtagccccattgcatttgggtaaatgtaacattgctggctggatcctgggaaacccagagtgtgaatcactctccacagcaagctcatggtcctacattgtggaaacatctagttcagacaatggaacgtgttacccaggagatttcatcgattatgaggagctaagagagcaattgagctcagtgtcatcatttgaaaggtttgagatgttccccaagacaagttcatggcccaatcatgactcgaacaaaggtgtaacggcagcatgtcctcatgctggagcaaaaagcttctacaaaaatttaatatggctagttaaaaaaggaaattcatacccaaagctcaacaaatcctacattaatgataaagggaaagaagtcctcgtgctatggggcattcaccatccatctactagtgctgaccaacaaagtctctatcagaatgcagatgcatatgtttttgtggggacatcaagatacagcaagaagttcaagccggaaatagcaataagacccaaagtgagggatcaagaagggagaatgaactattactggacactagtagagccgggagacaaaataacattcgaagcaactggaaatctagtggtaccgagatatgcattcgcaatggaaagaaatgctggatctggtattatcatttcagatacaccagtccacgattgcaatacaacttgccagacacccaagggtgctataaacaccagcctcccatttcagaatatacatccgatcacaattggaaaatgtccaaaatatgtaaaaagcacaaaattgagactggccacaggattgaggaatgtcccgtctattcaatctagaggcctatttggggccattgccggtttcattgaaggggggtggacagggatggtagatggatggtacggttatcaccatcaaaatgagcaggggtcaggatatgcagccgacctgaagagcacacagaatgccattgacgagattactaacaaagtaaattctgttattgaaaagatgaatacacagttcacagcagtaggtaaagagttcaaccacctggaaaaaagaatagagaatttaaataaaaaagttgatgatggtttcctggacatttggacttacaatgccgaactgttggttctattggaaaatgaaagaactttggactaccacgattcaaatgtgaagaacttatatgaaaaggtaagaagccagttaaaaaacaatgccaaggaaattggaaacggctgctttgaattttaccacaaatgcgataacacgtgcatggaaagtgtcaaaaatgggacttatgactacccaaaatactcagaggaagcaaaattaaacagagaagaaatagatggggtaaagctggaatcaacaaggatttaccagattttggcgatctattcaactgtcgccagttcattggtactggtagtctccctgggggcaatcagtttctggatgtgctctaatgggtctctacagtgtagaatatgtatttgatgaacacgtgggatccagatctgctgtgccttctagttgccagccatctgttgtttgcccctcccccgtgccttccttgaccctggaaggtgccactcccactgtcctttcctaataaaatgaggaaattgcatcgcattgtctgagtaggtgtcattctattctggggggtggggtggggcaggacagcaagggggaggattgggaagacaatagcaggcatgctggggatgcggtgggctctatgggtacccaggtgctgaagaattgacccggttcctcctgggccagaaagaagcaggcacatccccttctctgtgacacaccctgtccacgcccctggttcttagttccagccccactcataggacactcatagctcaggagggctccgccttcaatcccacccgctaaagtacttggagcggtctctccctccctcatcagcccaccaaaccaaacctagcctccaagagtgggaagaaattaaagcaagataggctattaagtgcagagggagagaaaatgcctccaacatgtgaggaagtaatgagagaaatcatagaattttaaggccatgatttaaggccatcatggccttaatcttccgcttcctcgctcactgactcgctgcgctcggtcgttcggctgcggcgagcggtatcagctcactcaaaggcggtaatacggttatccacagaatcaggggataacgcaggaaagaacatgtgagcaaaaggccagcaaaaggccaggaaccgtaaaaaggccgcgttgctggcgtttttccataggctccgcccccctgacgagcatcacaaaaatcgacgctcaagtcagaggtggcgaaacccgacaggactataaagataccaggcgtttccccctggaagctccctcgtgcgctctcctgttccgaccctgccgcttaccggatacctgtccgcctttctcccttcgggaagcgtggcgctttctcatagctcacgctgtaggtatctcagttcggtgtaggtcgttcgctccaagctgggctgtgtgcacgaaccccccgttcagcccgaccgctgcgccttatccggtaactatcgtcttgagtccaacccggtaagacacgacttatcgccactggcagcagccactggtaacaggattagcagagcgaggtatgtaggcggtgctacagagttcttgaagtggtggcctaactacggctacactagaagaacagtatttggtatctgcgctctgctgaagccagttaccttcggaaaaagagttggtagctcttgatccggcaaacaaaccaccgctggtagcggtggtttttttgtttgcaagcagcagattacgcgcagaaaaaaaggatctcaagaagatcctttgatcttttctacggggtctgacgctcagtggaacgaaaactcacgttaagggattttggtcatgagattatcaaaaaggatcttcacctagatccttttaaattaaaaatgaagttttaaatcaatctaaagtatatatgagtaaacttggtctgacagttaccaatgcttaatcagtgaggcacctatctcagcgatctgtctatttcgttcatccatagttgcctgactcggggggggggggcgctgaggtctgcctcgtgaagaaggtgttgctgactcataccaggcctgaatcgccccatcatccagccagaaagtgagggagccacggttgatgagagctttgttgtaggtggaccagttggtgattttgaacttttgctttgccacggaacggtctgcgttgtcgggaagatgcgtgatctgatccttcaactcagcaaaagttcgatttattcaacaaagccgccgtcccgtcaagtcagcgtaatgctctgccagtgttacaaccaattaaccaattctgattagaaaaactcatcgagcatcaaatgaaactgcaatttattcatatcaggattatcaataccatatttttgaaaaagccgtttctgtaatgaaggagaaaactcaccgaggcagttccataggatggcaagatcctggtatcggtctgcgattccgactcgtccaacatcaatacaacctattaatttcccctcgtcaaaaataaggttatcaagtgagaaatcaccatgagtgacgactgaatccggtgagaatggcaaaagcttatgcatttctttccagacttgttcaacaggccagccattacgctcgtcatcaaaatcactcgcatcaaccaaaccgttattcattcgtgattgcgcctgagcgagacgaaatacgcgatcgctgttaaaaggacaattacaaacaggaatcgaatgcaaccggcgcaggaacactgccagcgcatcaacaatattttcacctgaatcaggatattcttctaatacctggaatgctgttttcccggggatcgcagtggtgagtaaccatgcatcatcaggagtacggataaaatgcttgatggtcggaagaggcataaattccgtcagccagtttagtctgaccatctcatctgtaacatcattggcaacgctacctttgccatgtttcagaaacaactctggcgcatcgggcttcccatacaatcgatagattgtcgcacctgattgcccgacattatcgcgagcccatttatacccatataaatcagcatccatgttggaatttaatcgcggcctcgagcaagacgtttcccgttgaatatggctcataacaccccttgtattactgtttatgtaagcagacagttttattgttcatgatgatatatttttatcttgtgcaatgtaacatcagagattttgagacacaacgtggctttccccccccccccattattgaagcatttatcagggttattgtctcatgagcggatacatatttgaatgtatttagaaaaataaacaaataggggttccgcgcacatttccccgaaaagtgccacctgacgtctaagaaaccattattatcatgacattaacctataaaaataggcgtatcacgaggccctttcgtc

SEQ ID NO: 104 - DNA, 1701 bp, Influenza A virus
atgaaggcaatactagtagttctgctatatacatttgcaaccgcaaatgcagacacattatgtataggttatcatgcgaacaattcaacagacactgtagacacagtactagaaaagaatgtaacagtaacacactctgttaaccttctagaagacaagcataacgggaaactatgcaaactaagaggggtagccccattgcatttgggtaaatgtaacattgctggctggatcctgggaaacccagagtgtgaatcactctccacagcaagctcatggtcctacattgtggaaacatctagttcagacaatggaacgtgttacccaggagatttcatcgattatgaggagctaagagagcaattgagctcagtgtcatcatttgaaaggtttgagatgttccccaagacaagttcatggcccaatcatgactcgaacaaaggtgtaacggcagcatgtcctcatgctggagcaaaaagcttctacaaaaatttaatatggctagttaaaaaaggaaattcatacccaaagctcaacaaatcctacattaatgataaagggaaagaagtcctcgtgctatggggcattcaccatccatctactagtgctgaccaacaaagtctctatcagaatgcagatgcatatgtttttgtggggacatcaagatacagcaagaagttcaagccggaaatagcaataagacccaaagtgagggatcaagaagggagaatgaactattactggacactagtagagccgggagacaaaataacattcgaagcaactggaaatctagtggtaccgagatatgcattcgcaatggaaagaaatgctggatctggtattatcatttcagatacaccagtccacgattgcaatacaacttgccagacacccaagggtgctataaacaccagcctcccatttcagaatatacatccgatcacaattggaaaatgtccaaaatatgtaaaaagcacaaaattgagactggccacaggattgaggaatgtcccgtctattcaatctagaggcctatttggggccattgccggtttcattgaaggggggtggacagggatggtagatggatggtacggttatcaccatcaaaatgagcaggggtcaggatatgcagccgacctgaagagcacacagaatgccattgacgagattactaacaaagtaaattctgttattgaaaagatgaatacacagttcacagcagtaggtaaagagttcaaccacctggaaaaaagaatagagaatttaaataaaaaagttgatgatggtttcctggacatttggacttacaatgccgaactgttggttctattggaaaatgaaagaactttggactaccacgattcaaatgtgaagaacttatatgaaaaggtaagaagccagttaaaaaacaatgccaaggaaattggaaacggctgctttgaattttaccacaaatgcgataacacgtgcatggaaagtgtcaaaaatgggacttatgactacccaaaatactcagaggaagcaaaattaaacagagaagaaatagatggggtaaagctggaatcaacaaggatttaccagattttggcgatctattcaactgtcgccagttcattggtactggtagtctccctgggggcaatcagtttctggatgtgctctaatgggtctctacagtgtagaatatgtatttga

SEQ ID NO: 105 - protein, 566 aa, Influenza A virus
MKAILVVLLYTFATANADTLCIGYHANNSTDTVDTVLEKNVTVTHSVNLLEDKHNGKLCKLRGVAPLHLGKCNIAGWILGNPECESLSTASSWSYIVETSSSDNGTCYPGDFIDYEELREQLSSVSSFERFEMFPKTSSWPNHDSNKGVTAACPHAGAKSFYKNLIWLVKKGNSYPKLNKSYINDKGKEVLVLWGIHHPSTSADQQSLYQNADAYVFVGTSRYSKKFKPEIAIRPKVRDQEGRMNYYWTLVEPGDKITFEATGNLVVPRYAFAMERNAGSGIIISDTPVHDCNTTCQTPKGAINTSLPFQNIHPITIGKCPKYVKSTKLRLATGLRNVPSIQSRGLFGAIAGFIEGGWTGMVDGWYGYHHQNEQGSGYAADLKSTQNAIDEITNKVNSVIEKMNTQFTAVGKEFNHLEKRIENLNKKVDDGFLDIWTYNAELLVLLENERTLDYHDSNVKNLYEKVRSQLKNNAKEIGNGCFEFYHKCDNTCMESVKNGTYDYPKYSEEAKLNREEIDGVKLESTRIYQILAIYSTVASSLVLVVSLGAISFWMCSNGSLQCRICI

SEQ ID NO: 106 - DNA, 1701 bp, Influenza A virus
tcaaatacatattctacactgtagagacccattagagcacatccagaaactgattgcccccagggagactaccagtaccaatgaactggcgacagttgaatagatcgccaaaatctggtaaatccttgttgattccagctttaccccatctatttcttctctgtttaattttgcttcctctgagtattttgggtagtcataagtcccatttttgacactttccatgcacgtgttatcgcatttgtggtaaaattcaaagcagccgtttccaatttccttggcattgttttttaactggcttcttaccttttcatataagttcttcacatttgaatcgtggtagtccaaagttctttcattttccaatagaaccaacagttcggcattgtaagtccaaatgtccaggaaaccatcatcaacttttttatttaaattctctattcttttttccaggtggttgaactctttacctactgctgtgaactgtgtattcatcttttcaataacagaatttactttgttagtaatctcgtcaatggcattctgtgtgctcttcaggtcggctgcatatcctgacccctgctcattttgatggtgataaccgtaccatccatctaccatccctgtccaccccccttcaatgaaaccggcaatggccccaaataggcctctagattgaatagacgggacattcctcaatcctgtggccagtctcaattttgtgctttttacatattttggacattttccaattgtgatcggatgtatattctgaaatgggaggctggtgtttatagcacccttgggtgtctggcaagttgtattgcaatcgtggactggtgtatctgaaatgataataccagatccagcatttctttccattgcgaatgcatatctcggtaccactagatttccagttgcttcgaatgttattttgtctcccggctctactagtgtccagtaatagttcattctcccttcttgatccctcactttgggtcttattgctatttccggcttgaacttcttgctgtatcttgatgtccccacaaaaacatatgcatctgcattctgatagagactttgttggtcagcactagtagatggatggtgaatgccccatagcacgaggacttctttccctttatcattaatgtaggatttgttgagctttgggtatgaatttccttttttaactagccatattaaatttttgtagaagctttttgctccagcatgaggacatgctgccgttacacctttgttcgagtcatgattgggccatgaacttgtcttggggaacatctcaaacctttcaaatgatgacactgagctcaattgctctcttagctcctcataatcgatgaaatctcctgggtaacacgttccattgtctgaactagatgtttccacaatgtaggaccatgagcttgctgtggagagtgattcacactctgggtttcccaggatccagccagcaatgttacatttacccaaatgcaatggggctacccctcttagtttgcatagtttcccgttatgcttgtcttctagaaggttaacagagtgtgttactgttacattcttttctagtactgtgtctacagtgtctgttgaattgttcgcatgataacctatacataatgtgtctgcatttgcggttgcaaatgtatatagcagaactactagtattgccttcat

SEQ ID NO: 107 - DNA, 6105 bp, Influenza A virus
tcgcgcgtttcggtgatgacggtgaaaacctctgacacatgcagctcccggagacggtcacagcttgtctgtaagcggatgccgggagcagacaagcccgtcagggcgcgtcagcgggtgttggcgggtgtcggggctggcttaactatgcggcatcagagcagattgtactgagagtgcaccatatgcggtgtgaaataccgcacagatgcgtaaggagaaaataccgcatcagattggctattggccattgcatacgttgtatccatatcataatatgtacatttatattggctcatgtccaacattaccgccatgttgacattgattattgactagttattaatagtaatcaattacgggaacttccatagcccatatatggagttccgcgttacataacttacgggaatttccaaacctggctgaccgcccaacgacccccgcccattgacgtcaataatgacgtatgttcccatagtaacgccaatagggaacttccattgacgtcaatgggtggagtatttacggtaaactgcccacttgggaatttccaagtgtatcatatgccaagtacgccccctattgacgtcaatgacgggaacttccataagcttgcattatgcccagtacatgaccttatgggaatttcctacttggcagtacatctacgtattagtcatcgctattaccatggtgatgcggttttggcagtacatcaatgggcgtggatagcggtttgactcacgggaacttccaagtctccaccccattgacgtcaatgggagtttgttttgactcaccaaaatcaacgggaattcccaaaatgtcgtaacaactccgccccattgacgcaaatgggcggtaggcgtgtacggtgggaggtctatataagcagagctcgtttagtgaaccgtcagatcgcctggagacgccatccacgctgttttgacctccatagaagacaccgggaccgatccagcctccatcggctcgcatctctccttcacgcgcccgccgccctacctgaggccgccatccacgccggttgagtcgcgttctgccgcctcccgcctgtggtgcctcctgaactgcgtccgccgtctaggtaagtttaaagctcaggtcgagaccgggcctttgtccggcgctcccttggagcctacctagactcagccggctctccacgctttgcctgaccctgcttgctcaactctagttaacggtggagggcagtgtagtctgagcagtactcgttgctgccgcgcgcgccaccagacataatagctgacagactaacagactgttcctttccatgggtcttttctgcagtcaccgtcgtcgacacgatccgatatcgccgccaccatgaaggccaatctgctggtgctgctgtgcgccctggccgccgccgatgccgatacaatctgcatcggataccacgccaataatagcacagatacagtggatacagtgctggagaagaatgtgacagtgacacacagcgtgaatctgctggaggatagccacaatggaaagctgtgcagactgaagggaatcgctcctctgcagctgggaaagtgcaatatcgccggatggctgctgggaaatcctgagtgcgatcctctgctgcctgtgagaagctggagctacatcgtggagacacctaatagcgagaatggaatctgctaccctggagattttatcgattacgaggagctgagagagcagctgagcagcgtgagcagctttgagagatttgagatctttcctaaggagagcagctggcctaatcaccaaacaacaaagggagtgacagccgcctgcagccacgccggaaagagcagcttttacagaaatctgctgtggctgacagagaaggagggaagctaccctaagctgaagaatagctacgtgaataagaagggaaaggaggtgctggtgctgtggggaatccaccaccctagcaatagcaaggatcagcagaatatctaccagaatgagaatgcctacgtgagcgtggtgacaagcaattacaatagaagatttacacctgagatcgccgagagacctaaggtgagagatcaggccggaagaatgaattactactggacactgctgaagcctggagatacaatcatctttgaggccaatggaaatctgatcgctcctagatacgcctttgccctgagcagaggatttggaagcggaatcatcacaagcaatgccagcatgcacgagtgcaatacaaagtgccagacacctctgggagccatcaatagcagcctgccttttcagaatatccaccctgtgacaatcggagagtgccctaagtacgtgagaagcgccaagctgagaatggtgacaggactgagaaatatccctagcatccagagcagaggactgtttggagccatcgccggatttatcgagggaggatggacaggaatgatcgatggatggtacggataccaccaccagaatgagcagggaagcggatacgccgccgatcagaagagcacacagaatgccatcaatggaatcacaaataaggtgaatagcgtgatcgagaagatgaatatccagtttacagccgtgggaaaggagtttaataagctggagaagagaatggagaatctgaataagaaggtggatgatggatttctggatatctggacatacaatgccgagctgctggtgctgctggagaatgagagaacactggattttcacgatagcaatgtgaagaatctgtacgagaaggtgaagagccagctgaagaataatgccaaggagatcggaaatggatgctttgagttttaccacaagtgcgataatgagtgcatggagagcgtgagaaatggaacatacgattaccctaagtacagcgaggagagcaagctgaatagagagaaggtggatggagtgaagctggagagcatgggaatctaccagatcctggccatctacagcacagtggccagcagcctggtgctgctggtgagcctgggagccatcagcttttggatgtgcagcaatggaagcctgcagtgcagaatctgcatctgagcggccgctctagaccaggccctggatccagatctgctgtgccttctagttgccagccatctgttgtttgcccctcccccgtgccttccttgaccctggaaggtgccactcccactgtcctttcctaataaaatgaggaaattgcatcgcattgtctgagtaggtgtcattctattctggggggtggggtggggcaggacagcaagggggaggattgggaagacaatagcaggcatgctggggatgcggtgggctctatgggtacccaggtgctgaagaattgacccggttcctcctgggccagaaagaagcaggcacatccccttctctgtgacacaccctgtccacgcccctggttcttagttccagccccactcataggacactcatagctcaggagggctccgccttcaatcccacccgctaaagtacttggagcggtctctccctccctcatcagcccaccaaaccaaacctagcctccaagagtgggaagaaattaaagcaagataggctattaagtgcagagggagagaaaatgcctccaacatgtgaggaagtaatgagagaaatcatagaattttaaggccatcatggccttaatcttccgcttcctcgctcactgactcgctgcgctcggtcgttcggctgcggcgagcggtatcagctcactcaaaggcggtaatacggttatccacagaatcaggggataacgcaggaaagaacatgtgagcaaaaggccagcaaaaggccaggaaccgtaaaaaggccgcgttgctggcgtttttccataggctccgcccccctgacgagcatcacaaaaatcgacgctcaagtcagaggtggcgaaacccgacaggactataaagataccaggcgtttccccctggaagctccctcgtgcgctctcctgttccgaccctgccgcttaccggatacctgtccgcctttctcccttcgggaagcgtggcgctttctcatagctcacgctgtaggtatctcagttcggtgtaggtcgttcgctccaagctgggctgtgtgcacgaaccccccgttcagcccgaccgctgcgccttatccggtaactatcgtcttgagtccaacccggtaagacacgacttatcgccactggcagcagccactggtaacaggattagcagagcgaggtatgtaggcggtgctacagagttcttgaagtggtggcctaactacggctacactagaagaacagtatttggtatctgcgctctgctgaagccagttaccttcggaaaaagagttggtagctcttgatccggcaaacaaaccaccgctggtagcggtggtttttttgtttgcaagcagcagattacgcgcagaaaaaaaggatctcaagaagatcctttgatcttttctacggggtctgacgctcagtggaacgaaaactcacgttaagggattttggtcatgagattatcaaaaaggatcttcacctagatccttttaaattaaaaatgaagttttaaatcaatctaaagtatatatgagtaaacttggtctgacagttaccaatgcttaatcagtgaggcacctatctcagcgatctgtctatttcgttcatccatagttgcctgactcggggggggggggcgctgaggtctgcctcgtgaagaaggtgttgctgactcataccaggcctgaatcgccccatcatccagccagaaagtgagggagccacggttgatgagagctttgttgtaggtggaccagttggtgattttgaacttttgctttgccacggaacggtctgcgttgtcgggaagatgcgtgatctgatccttcaactcagcaaaagttcgatttattcaacaaagccgccgtcccgtcaagtcagcgtaatgctctgccagtgttacaaccaattaaccaattctgattagaaaaactcatcgagcatcaaatgaaactgcaatttattcatatcaggattatcaataccatatttttgaaaaagccgtttctgtaatgaaggagaaaactcaccgaggcagttccataggatggcaagatcctggtatcggtctgcgattccgactcgtccaacatcaatacaacctattaatttcccctcgtcaaaaataaggttatcaagtgagaaatcaccatgagtgacgactgaatccggtgagaatggcaaaagcttatgcatttctttccagacttgttcaacaggccagccattacgctcgtcatcaaaatcactcgcatcaaccaaaccgttattcattcgtgattgcgcctgagcgagacgaaatacgcgatcgctgttaaaaggacaattacaaacaggaatcgaatgcaaccggcgcaggaacactgccagcgcatcaacaatattttcacctgaatcaggatattcttctaatacctggaatgctgttttcccggggatcgcagtggtgagtaaccatgcatcatcaggagtacggataaaatgcttgatggtcggaagaggcataaattccgtcagccagtttagtctgaccatctcatctgtaacatcattggcaacgctacctttgccatgtttcagaaacaactctggcgcatcgggcttcccatacaatcgatagattgtcgcacctgattgcccgacattatcgcgagcccatttatacccatataaatcagcatccatgttggaatttaatcgcggcctcgagcaagacgtttcccgttgaatatggctcataacaccccttgtattactgtttatgtaagcagacagttttattgttcatgatgatatatttttatcttgtgcaatgtaacatcagagattttgagacacaacgtggctttccccccccccccattattgaagcatttatcagggttattgtctcatgagcggatacatatttgaatgtatttagaaaaataaacaaataggggttccgcgcacatttccccgaaaagtgccacctgacgtctaagaaaccattattatcatgacattaacctataaaaataggcgtatcacgaggccctttcgtc

SEQ ID NO: 108 - DNA, 1724 bp, Influenza A virus
atgaaggccaatctgctggtgctgctgtgcgccctggccgccgccgatgccgatacaatctgcatcggataccacgccaataatagcacagatacagtggatacagtgctggagaagaatgtgacagtgacacacagcgtgaatctgctggaggatagccacaatggaaagctgtgcagactgaagggaatcgctcctctgcagctgggaaagtgcaatatcgccggatggctgctgggaaatcctgagtgcgatcctctgctgcctgtgagaagctggagctacatcgtggagacacctaatagcgagaatggaatctgctaccctggagattttatcgattacgaggagctgagagagcagctgagcagcgtgagcagctttgagagatttgagatctttcctaaggagagcagctggcctaatcaccaaacaacaaagggagtgacagccgcctgcagccacgccggaaagagcagcttttacagaaatctgctgtggctgacagagaaggagggaagctaccctaagctgaagaatagctacgtgaataagaagggaaaggaggtgctggtgctgtggggaatccaccaccctagcaatagcaaggatcagcagaatatctaccagaatgagaatgcctacgtgagcgtggtgacaagcaattacaatagaagatttacacctgagatcgccgagagacctaaggtgagagatcaggccggaagaatgaattactactggacactgctgaagcctggagatacaatcatctttgaggccaatggaaatctgatcgctcctagatacgcctttgccctgagcagaggatttggaagcggaatcatcacaagcaatgccagcatgcacgagtgcaatacaaagtgccagacacctctgggagccatcaatagcagcctgccttttcagaatatccaccctgtgacaatcggagagtgccctaagtacgtgagaagcgccaagctgagaatggtgacaggactgagaaatatccctagcatccagagcagaggactgtttggagccatcgccggatttatcgagggaggatggacaggaatgatcgatggatggtacggataccaccaccagaatgagcagggaagcggatacgccgccgatcagaagagcacacagaatgccatcaatggaatcacaaataaggtgaatagcgtgatcgagaagatgaatatccagtttacagccgtgggaaaggagtttaataagctggagaagagaatggagaatctgaataagaaggtggatgatggatttctggatatctggacatacaatgccgagctgctggtgctgctggagaatgagagaacactggattttcacgatagcaatgtgaagaatctgtacgagaaggtgaagagccagctgaagaataatgccaaggagatcggaaatggatgctttgagttttaccacaagtgcgataatgagtgcatggagagcgtgagaaatggaacatacgattaccctaagtacagcgaggagagcaagctgaatagagagaaggtggatggagtgaagctggagagcatgggaatctaccagatcctggccatctacagcacagtggccagcagcctggtgctgctggtgagcctgggagccatcagcttttggatgtgcagcaatggaagcctgcagtgcagaatctgcatctgagcggccgctctagaccaggccct

SEQ ID NO: 109 - protein, 566 aa, Influenza A virus
MKANLLVLLCALAAADADTICIGYHANNSTDTVDTVLEKNVTVTHSVNLLEDSHNGKLCRLKGIAPLQLGKCNIAGWLLGNPECDPLLPVRSWSYIVETPNSENGICYPGDFIDYEELREQLSSVSSFERFEIFPKESSWPNHQTTKGVTAACSHAGKSSFYRNLLWLTEKEGSYPKLKNSYVNKKGKEVLVLWGIHHPSNSKDQQNIYQNENAYVSVVTSNYNRRFTPEIAERPKVRDQAGRMNYYWTLLKPGDTIIFEANGNLIAPRYAFALSRGFGSGIITSNASMHECNTKCQTPLGAINSSLPFQNIHPVTIGECPKYVRSAKLRMVTGLRNIPSIQSRGLFGAIAGFIEGGWTGMIDGWYGYHHQNEQGSGYAADQKSTQNAINGITNKVNSVIEKMNIQFTAVGKEFNKLEKRMENLNKKVDDGFLDIWTYNAELLVLLENERTLDFHDSNVKNLYEKVKSQLKNNAKEIGNGCFEFYHKCDNECMESVRNGTYDYPKYSEESKLNREKVDGVKLESMGIYQILAIYSTVASSLVLLVSLGAISFWMCSNGSLQCRICI

SEQ ID NO: 110 - DNA, 1701 bp, Influenza A virus
tcagatgcagattctgcactgcaggcttccattgctgcacatccaaaagctgatggctcccaggctcaccagcagcaccaggctgctggccactgtgctgtagatggccaggatctggtagattcccatgctctccagcttcactccatccaccttctctctattcagcttgctctcctcgctgtacttagggtaatcgtatgttccatttctcacgctctccatgcactcattatcgcacttgtggtaaaactcaaagcatccatttccgatctccttggcattattcttcagctggctcttcaccttctcgtacagattcttcacattgctatcgtgaaaatccagtgttctctcattctccagcagcaccagcagctcggcattgtatgtccagatatccagaaatccatcatccaccttcttattcagattctccattctcttctccagcttattaaactcctttcccacggctgtaaactggatattcatcttctcgatcacgctattcaccttatttgtgattccattgatggcattctgtgtgctcttctgatcggcggcgtatccgcttccctgctcattctggtggtggtatccgtaccatccatcgatcattcctgtccatcctccctcgataaatccggcgatggctccaaacagtcctctgctctggatgctagggatatttctcagtcctgtcaccattctcagcttggcgcttctcacgtacttagggcactctccgattgtcacagggtggatattctgaaaaggcaggctgctattgatggctcccagaggtgtctggcactttgtattgcactcgtgcatgctggcattgcttgtgatgattccgcttccaaatcctctgctcagggcaaaggcgtatctaggagcgatcagatttccattggcctcaaagatgattgtatctccaggcttcagcagtgtccagtagtaattcattcttccggcctgatctctcaccttaggtctctcggcgatctcaggtgtaaatcttctattgtaattgcttgtcaccacgctcacgtaggcattctcattctggtagatattctgctgatccttgctattgctagggtggtggattccccacagcaccagcacctcctttcccttcttattcacgtagctattcttcagcttagggtagcttccctccttctctgtcagccacagcagatttctgtaaaagctgctctttccggcgtggctgcaggcggctgtcactccctttgttgtttggtgattaggccagctgctctccttaggaaagatctcaaatctctcaaagctgctcacgctgctcagctgctctctcagctcctcgtaatcgataaaatctccagggtagcagattccattctcgctattaggtgtctccacgatgtagctccagcttctcacaggcagcagaggatcgcactcaggatttcccagcagccatccggcgatattgcactttcccagctgcagaggagcgattcccttcagtctgcacagctttccattgtggctatcctccagcagattcacgctgtgtgtcactgtcacattcttctccagcactgtatccactgtatctgtgctattattggcgtggtatccgatgcagattgtatcggcatcggcggcggccagggcgcacagcagcaccagcagattggccttcat

SEQ ID NO: 111 - DNA, 6123 bp, Influenza A virus
tcgcgcgtttcggtgatgacggtgaaaacctctgacacatgcagctcccggagacggtcacagcttgtctgtaagcggatgccgggagcagacaagcccgtcagggcgcgtcagcgggtgttggcgggtgtcggggctggcttaactatgcggcatcagagcagattgtactgagagtgcaccatatgcggtgtgaaataccgcacagatgcgtaaggagaaaataccgcatcagattggctattggccattgcatacgttgtatccatatcataatatgtacatttatattggctcatgtccaacattaccgccatgttgacattgattattgactagttattaatagtaatcaattacgggaacttccatagcccatatatggagttccgcgttacataacttacgggaatttccaaacctggctgaccgcccaacgacccccgcccattgacgtcaataatgacgtatgttcccatagtaacgccaatagggaacttccattgacgtcaatgggtggagtatttacggtaaactgcccacttgggaatttccaagtgtatcatatgccaagtacgccccctattgacgtcaatgacgggaacttccataagcttgcattatgcccagtacatgaccttatgggaatttcctacttggcagtacatctacgtattagtcatcgctattaccatggtgatgcggttttggcagtacatcaatgggcgtggatagcggtttgactcacgggaacttccaagtctccaccccattgacgtcaatgggagtttgttttgactcaccaaaatcaacgggaattcccaaaatgtcgtaacaactccgccccattgacgcaaatgggcggtaggcgtgtacggtgggaggtctatataagcagagctcgtttagtgaaccgtcagatcgcctggagacgccatccacgctgttttgacctccatagaagacaccgggaccgatccagcctccatcggctcgcatctctccttcacgcgcccgccgccctacctgaggccgccatccacgccggttgagtcgcgttctgccgcctcccgcctgtggtgcctcctgaactgcgtccgccgtctaggtaagtttaaagctcaggtcgagaccgggcctttgtccggcgctcccttggagcctacctagactcagccggctctccacgctttgcctgaccctgcttgctcaactctagttaacggtggagggcagtgtagtctgagcagtactcgttgctgccgcgcgcgccaccagacataatagctgacagactaacagactgttcctttccatgggtcttttctgcagtcaccgtcgtcgacacgtgtgatcagatatcgcggccgctctagagatatcgccaccatgaaggccaaactgctggtgctgctgtgtacctttaccgccacctacgccgacacaatctgtatcggctaccacgccaacaatagcaccgacaccgtggatacagtgctggagaagaacgtgaccgtgacccactctgtgaacctgctggaggacagccacaatggcaagctgtgtctgctgaaaggcattgcccctctgcagctgggcaattgttctgtggccggatggattctgggcaaccccgagtgtgagctgctgatttctaaggagagctggagctacatcgtggagacccccaatcctgagaatggcacctgctaccctggctacttcgccgattacgaggagctgcgcgagcagctgtctagcgtgtccagcttcgagagattcgagatcttccccaaggagtccagctggcctcaacacacagtgacaggcgtgtctgccagctgtagccacaacggcaaaagcagcttctaccggaacctgctgtggctgacaggcaagaatggcctgtaccccaacctgagcaagagctacgtgaacaacaaggaaaaggaagtgctggtgctgtggggagtgcaccaccctcccaacatcggaaatcagcgggccctgtaccacacagagaacgcctatgtgagcgtggtgtccagccactacagcagaagattcacccccgagatcgccaagagacccaaagtgagagaccaggagggccggatcaattactactggaccctgctggagcctggcgataccatcatcttcgaggccaacggcaatctgatcgccccttggtatgcctttgccctgagcagaggctttggcagcggcatcatcacaagcaacgcccccatggatgagtgtgatgccaagtgccagacacctcagggcgccatcaatagcagcctgcccttccagaatgtgcaccctgtgaccatcggcgagtgccccaagtatgtgagaagcgccaagctgagaatggtgaccggcctgagaaacatccctagcatccagagcagaggactgtttggagccatcgccggattcatcgagggaggatggacaggcatggtggatggctggtacggctaccaccaccagaatgagcagggctctggatatgccgccgatcagaagtctacccagaacgccatcaacggcatcaccaacaaggtgaacagcgtgatcgagaagatgaacacccagtttaccgctgtgggcaaggagttcaacaagctggagcggaggatggagaacctgaacaagaaggtggacgacggctttctggacatctggacctacaatgccgaactcctggtcctcctcgagaatgagaggaccctggacttccacgacagcaacgtgaagaacctgtatgagaaggtgaagagccagctgaagaacaacgccaaggagatcggcaacggctgcttcgagttctaccacaagtgtaacaacgagtgtatggagagcgtgaagaacggcacctacgactaccctaagtacagcgaggagagcaagctgaaccgggagaagatcgatggcgtgaagctggagagcatgggcgtgtatcagatcctggccatctacagcacagtggcctcttctctggtgctgctggtgtctctgggcgccatctccttttggatgtgctccaacggcagcctgcagtgcaggatctgtatctgatgaacacgtgggatccagatctgctgtgccttctagttgccagccatctgttgtttgcccctcccccgtgccttccttgaccctggaaggtgccactcccactgtcctttcctaataaaatgaggaaattgcatcgcattgtctgagtaggtgtcattctattctggggggtggggtggggcaggacagcaagggggaggattgggaagacaatagcaggcatgctggggatgcggtgggctctatgggtacccaggtgctgaagaattgacccggttcctcctgggccagaaagaagcaggcacatccccttctctgtgacacaccctgtccacgcccctggttcttagttccagccccactcataggacactcatagctcaggagggctccgccttcaatcccacccgctaaagtacttggagcggtctctccctccctcatcagcccaccaaaccaaacctagcctccaagagtgggaagaaattaaagcaagataggctattaagtgcagagggagagaaaatgcctccaacatgtgaggaagtaatgagagaaatcatagaattttaaggccatgatttaaggccatcatggccttaatcttccgcttcctcgctcactgactcgctgcgctcggtcgttcggctgcggcgagcggtatcagctcactcaaaggcggtaatacggttatccacagaatcaggggataacgcaggaaagaacatgtgagcaaaaggccagcaaaaggccaggaaccgtaaaaaggccgcgttgctggcgtttttccataggctccgcccccctgacgagcatcacaaaaatcgacgctcaagtcagaggtggcgaaacccgacaggactataaagataccaggcgtttccccctggaagctccctcgtgcgctctcctgttccgaccctgccgcttaccggatacctgtccgcctttctcccttcgggaagcgtggcgctttctcatagctcacgctgtaggtatctcagttcggtgtaggtcgttcgctccaagctgggctgtgtgcacgaaccccccgttcagcccgaccgctgcgccttatccggtaactatcgtcttgagtccaacccggtaagacacgacttatcgccactggcagcagccactggtaacaggattagcagagcgaggtatgtaggcggtgctacagagttcttgaagtggtggcctaactacggctacactagaagaacagtatttggtatctgcgctctgctgaagccagttaccttcggaaaaagagttggtagctcttgatccggcaaacaaaccaccgctggtagcggtggtttttttgtttgcaagcagcagattacgcgcagaaaaaaaggatctcaagaagatcctttgatcttttctacggggtctgacgctcagtggaacgaaaactcacgttaagggattttggtcatgagattatcaaaaaggatcttcacctagatccttttaaattaaaaatgaagttttaaatcaatctaaagtatatatgagtaaacttggtctgacagttaccaatgcttaatcagtgaggcacctatctcagcgatctgtctatttcgttcatccatagttgcctgactcggggggggggggcgctgaggtctgcctcgtgaagaaggtgttgctgactcataccaggcctgaatcgccccatcatccagccagaaagtgagggagccacggttgatgagagctttgttgtaggtggaccagttggtgattttgaacttttgctttgccacggaacggtctgcgttgtcgggaagatgcgtgatctgatccttcaactcagcaaaagttcgatttattcaacaaagccgccgtcccgtcaagtcagcgtaatgctctgccagtgttacaaccaattaaccaattctgattagaaaaactcatcgagcatcaaatgaaactgcaatttattcatatcaggattatcaataccatatttttgaaaaagccgtttctgtaatgaaggagaaaactcaccgaggcagttccataggatggcaagatcctggtatcggtctgcgattccgactcgtccaacatcaatacaacctattaatttcccctcgtcaaaaataaggttatcaagtgagaaatcaccatgagtgacgactgaatccggtgagaatggcaaaagcttatgcatttctttccagacttgttcaacaggccagccattacgctcgtcatcaaaatcactcgcatcaaccaaaccgttattcattcgtgattgcgcctgagcgagacgaaatacgcgatcgctgttaaaaggacaattacaaacaggaatcgaatgcaaccggcgcaggaacactgccagcgcatcaacaatattttcacctgaatcaggatattcttctaatacctggaatgctgttttcccggggatcgcagtggtgagtaaccatgcatcatcaggagtacggataaaatgcttgatggtcggaagaggcataaattccgtcagccagtttagtctgaccatctcatctgtaacatcattggcaacgctacctttgccatgtttcagaaacaactctggcgcatcgggcttcccatacaatcgatagattgtcgcacctgattgcccgacattatcgcgagcccatttatacccatataaatcagcatccatgttggaatttaatcgcggcctcgagcaagacgtttcccgttgaatatggctcataacaccccttgtattactgtttatgtaagcagacagttttattgttcatgatgatatatttttatcttgtgcaatgtaacatcagagattttgagacacaacgtggctttccccccccccccattattgaagcatttatcagggttattgtctcatgagcggatacatatttgaatgtatttagaaaaataaacaaataggggttccgcgcacatttccccgaaaagtgccacctgacgtctaagaaaccattattatcatgacattaacctataaaaataggcgtatcacgaggccctttcgtc

SEQ ID NO: 112 - DNA, 1698 bp, Influenza A virus
atgaaggccaaactgctggtgctgctgtgtacctttaccgccacctacgccgacacaatctgtatcggctaccacgccaacaatagcaccgacaccgtggatacagtgctggagaagaacgtgaccgtgacccactctgtgaacctgctggaggacagccacaatggcaagctgtgtctgctgaaaggcattgcccctctgcagctgggcaattgttctgtggccggatggattctgggcaaccccgagtgtgagctgctgatttctaaggagagctggagctacatcgtggagacccccaatcctgagaatggcacctgctaccctggctacttcgccgattacgaggagctgcgcgagcagctgtctagcgtgtccagcttcgagagattcgagatcttccccaaggagtccagctggcctcaacacacagtgacaggcgtgtctgccagctgtagccacaacggcaaaagcagcttctaccggaacctgctgtggctgacaggcaagaatggcctgtaccccaacctgagcaagagctacgtgaacaacaaggaaaaggaagtgctggtgctgtggggagtgcaccaccctcccaacatcggaaatcagcgggccctgtaccacacagagaacgcctatgtgagcgtggtgtccagccactacagcagaagattcacccccgagatcgccaagagacccaaagtgagagaccaggagggccggatcaattactactggaccctgctggagcctggcgataccatcatcttcgaggccaacggcaatctgatcgccccttggtatgcctttgccctgagcagaggctttggcagcggcatcatcacaagcaacgcccccatggatgagtgtgatgccaagtgccagacacctcagggcgccatcaatagcagcctgcccttccagaatgtgcaccctgtgaccatcggcgagtgccccaagtatgtgagaagcgccaagctgagaatggtgaccggcctgagaaacatccctagcatccagagcagaggactgtttggagccatcgccggattcatcgagggaggatggacaggcatggtggatggctggtacggctaccaccaccagaatgagcagggctctggatatgccgccgatcagaagtctacccagaacgccatcaacggcatcaccaacaaggtgaacagcgtgatcgagaagatgaacacccagtttaccgctgtgggcaaggagttcaacaagctggagcggaggatggagaacctgaacaagaaggtggacgacggctttctggacatctggacctacaatgccgaactcctggtcctcctcgagaatgagaggaccctggacttccacgacagcaacgtgaagaacctgtatgagaaggtgaagagccagctgaagaacaacgccaaggagatcggcaacggctgcttcgagttctaccacaagtgtaacaacgagtgtatggagagcgtgaagaacggcacctacgactaccctaagtacagcgaggagagcaagctgaaccgggagaagatcgatggcgtgaagctggagagcatgggcgtgtatcagatcctggccatctacagcacagtggcctcttctctggtgctgctggtgtctctgggcgccatctccttttggatgtgctccaacggcagcctgcagtgcaggatctgtatctga

SEQ ID NO: 113 - protein, 565 aa, Influenza A virus
MKAKLLVLLCTFTATYADTICIGYHANNSTDTVDTVLEKNVTVTHSVNLLEDSHNGKLCLLKGIAPLQLGNCSVAGWILGNPECELLISKESWSYIVETPNPENGTCYPGYFADYEELREQLSSVSSFERFEIFPKESSWPQHTVTGVSASCSHNGKSSFYRNLLWLTGKNGLYPNLSKSYVNNKEKEVLVLWGVHHPPNIGNQRALYHTENAYVSVVSSHYSRRFTPEIAKRPKVRDQEGRINYYWTLLEPGDTIIFEANGNLIAPWYAFALSRGFGSGIITSNAPMDECDAKCQTPQGAINSSLPFQNVHPVTIGECPKYVRSAKLRMVTGLRNIPSIQSRGLFGAIAGFIEGGWTGMVDGWYGYHHQNEQGSGYAADQKSTQNAINGITNKVNSVIEKMNTQFTAVGKEFNKLERRMENLNKKVDDGFLDIWTYNAELLVLLENERTLDFHDSNVKNLYEKVKSQLKNNAKEIGNGCFEFYHKCNNECMESVKNGTYDYPKYSEESKLNREKIDGVKLESMGVYQILAIYSTVASSLVLLVSLGAISFWMCSNGSLQCRICI

SEQ ID NO: 114 - DNA, 1698 bp, Influenza A virus
tcagatacagatcctgcactgcaggctgccgttggagcacatccaaaaggagatggcgcccagagacaccagcagcaccagagaagaggccactgtgctgtagatggccaggatctgatacacgcccatgctctccagcttcacgccatcgatcttctcccggttcagcttgctctcctcgctgtacttagggtagtcgtaggtgccgttcttcacgctctccatacactcgttgttacacttgtggtagaactcgaagcagccgttgccgatctccttggcgttgttcttcagctggctcttcaccttctcatacaggttcttcacgttgctgtcgtggaagtccagggtcctctcattctcgaggaggaccaggagttcggcattgtaggtccagatgtccagaaagccgtcgtccaccttcttgttcaggttctccatcctccgctccagcttgttgaactccttgcccacagcggtaaactgggtgttcatcttctcgatcacgctgttcaccttgttggtgatgccgttgatggcgttctgggtagacttctgatcggcggcatatccagagccctgctcattctggtggtggtagccgtaccagccatccaccatgcctgtccatcctccctcgatgaatccggcgatggctccaaacagtcctctgctctggatgctagggatgtttctcaggccggtcaccattctcagcttggcgcttctcacatacttggggcactcgccgatggtcacagggtgcacattctggaagggcaggctgctattgatggcgccctgaggtgtctggcacttggcatcacactcatccatgggggcgttgcttgtgatgatgccgctgccaaagcctctgctcagggcaaaggcataccaaggggcgatcagattgccgttggcctcgaagatgatggtatcgccaggctccagcagggtccagtagtaattgatccggccctcctggtctctcactttgggtctcttggcgatctcgggggtgaatcttctgctgtagtggctggacaccacgctcacataggcgttctctgtgtggtacagggcccgctgatttccgatgttgggagggtggtgcactccccacagcaccagcacttccttttccttgttgttcacgtagctcttgctcaggttggggtacaggccattcttgcctgtcagccacagcaggttccggtagaagctgcttttgccgttgtggctacagctggcagacacgcctgtcactgtgtgttgaggccagctggactccttggggaagatctcgaatctctcgaagctggacacgctagacagctgctcgcgcagctcctcgtaatcggcgaagtagccagggtagcaggtgccattctcaggattgggggtctccacgatgtagctccagctctccttagaaatcagcagctcacactcggggttgcccagaatccatccggccacagaacaattgcccagctgcagaggggcaatgcctttcagcagacacagcttgccattgtggctgtcctccagcaggttcacagagtgggtcacggtcacgttcttctccagcactgtatccacggtgtcggtgctattgttggcgtggtagccgatacagattgtgtcggcgtaggtggcggtaaaggtacacagcagcaccagcagtttggccttcat

SEQ ID NO: 115 - DNA, 6123 bp, Influenza A virus
tcgcgcgtttcggtgatgacggtgaaaacctctgacacatgcagctcccggagacggtcacagcttgtctgtaagcggatgccgggagcagacaagcccgtcagggcgcgtcagcgggtgttggcgggtgtcggggctggcttaactatgcggcatcagagcagattgtactgagagtgcaccatatgcggtgtgaaataccgcacagatgcgtaaggagaaaataccgcatcagattggctattggccattgcatacgttgtatccatatcataatatgtacatttatattggctcatgtccaacattaccgccatgttgacattgattattgactagttattaatagtaatcaattacgggaacttccatagcccatatatggagttccgcgttacataacttacgggaatttccaaacctggctgaccgcccaacgacccccgcccattgacgtcaataatgacgtatgttcccatagtaacgccaatagggaacttccattgacgtcaatgggtggagtatttacggtaaactgcccacttgggaatttccaagtgtatcatatgccaagtacgccccctattgacgtcaatgacgggaacttccataagcttgcattatgcccagtacatgaccttatgggaatttcctacttggcagtacatctacgtattagtcatcgctattaccatggtgatgcggttttggcagtacatcaatgggcgtggatagcggtttgactcacgggaacttccaagtctccaccccattgacgtcaatgggagtttgttttgactcaccaaaatcaacgggaattcccaaaatgtcgtaacaactccgccccattgacgcaaatgggcggtaggcgtgtacggtgggaggtctatataagcagagctcgtttagtgaaccgtcagatcgcctggagacgccatccacgctgttttgacctccatagaagacaccgggaccgatccagcctccatcggctcgcatctctccttcacgcgcccgccgccctacctgaggccgccatccacgccggttgagtcgcgttctgccgcctcccgcctgtggtgcctcctgaactgcgtccgccgtctaggtaagtttaaagctcaggtcgagaccgggcctttgtccggcgctcccttggagcctacctagactcagccggctctccacgctttgcctgaccctgcttgctcaactctagttaacggtggagggcagtgtagtctgagcagtactcgttgctgccgcgcgcgccaccagacataatagctgacagactaacagactgttcctttccatgggtcttttctgcagtcaccgtcgtcgacacgtgtgatcagatatcgcggccgctctagagatatcgccaccatgaaggccaaactgctggtgctgctgtgtacctttaccgccacctacgccgacacaatctgtatcggctaccacgccaacaatagcaccgacaccgtggatacagtgctggagaagaacgtgaccgtgacccactctgtgaacctgctggaggacagccacaatggcaagctgtgtctgctgaaaggcattgcccctctgcagctgggcaattgttctgtggccggatggattctgggcaaccccgagtgtgagctgctgatttctaaggagagctggagctacatcgtggagacccccaatcctgagaatggcacctgctaccctggctacttcgccgattacgaggagctgcgcgagcagctgtctagcgtgtccagcttcgagagattcgagatcttccccaaggagtccagctggcctaatcacacagtgacaggcgtgtctgccagctgtagccacaacggcaaaagcagcttctaccggaacctgctgtggctgacaggcaagaatggcctgtacccccaactgagcaagagctacgtgaacaacaaggaaaaggaagtgctggtgctgtggggagtgcaccaccctcccaacatcggaaatcagcgggccctgtaccacacagagaacgcctatgtgagcgtggtgtccagccactacagcagaagattcacccccgagatcgccaagagacccaaagtgagagaccaggagggccggatcaattactactggaccctgctggagcctggcgataccatcatcttcgaggccaacggcaatctgatcgccccttggtatgcctttgccctgagcagaggctttggcagcggcatcatcacaagcaacgcccccatggatgagtgtgatgccaagtgccagacacctcagggcgccatcaatagcagcctgcccttccagaatgtgcaccctgtgaccatcggcgagtgccccaagtatgtgagaagcgccaagctgagaatggtgaccggcctgagaaacatccctagcatccagagcagaggactgtttggagccatcgccggattcatcgagggaggatggacaggcatggtggatggctggtacggctaccaccaccagaatgagcagggctctggatatgccgccgatcagaagtctacccagaacgccatcaacggcatcaccaacaaggtgaacagcgtgatcgagaagatgaacacccagtttaccgctgtgggcaaggagttcaacaagctggagcggaggatggagaacctgaacaagaaggtggacgacggctttctggacatctggacctacaatgccgaactcctggtcctcctcgagaatgagaggaccctggacttccacgacagcaacgtgaagaacctgtatgagaaggtgaagagccagctgaagaacaacgccaaggagatcggcaacggctgcttcgagttctaccacaagtgtaacaacgagtgtatggagagcgtgaagaacggcacctacgactaccctaagtacagcgaggagagcaagctgaaccgggagaagatcgatggcgtgaagctggagagcatgggcgtgtatcagatcctggccatctacagcacagtggcctcttctctggtgctgctggtgtctctgggcgccatctccttttggatgtgctccaacggcagcctgcagtgcaggatctgtatctgatgaacacgtgggatccagatctgctgtgccttctagttgccagccatctgttgtttgcccctcccccgtgccttccttgaccctggaaggtgccactcccactgtcctttcctaataaaatgaggaaattgcatcgcattgtctgagtaggtgtcattctattctggggggtggggtggggcaggacagcaagggggaggattgggaagacaatagcaggcatgctggggatgcggtgggctctatgggtacccaggtgctgaagaattgacccggttcctcctgggccagaaagaagcaggcacatccccttctctgtgacacaccctgtccacgcccctggttcttagttccagccccactcataggacactcatagctcaggagggctccgccttcaatcccacccgctaaagtacttggagcggtctctccctccctcatcagcccaccaaaccaaacctagcctccaagagtgggaagaaattaaagcaagataggctattaagtgcagagggagagaaaatgcctccaacatgtgaggaagtaatgagagaaatcatagaattttaaggccatgatttaaggccatcatggccttaatcttccgcttcctcgctcactgactcgctgcgctcggtcgttcggctgcggcgagcggtatcagctcactcaaaggcggtaatacggttatccacagaatcaggggataacgcaggaaagaacatgtgagcaaaaggccagcaaaaggccaggaaccgtaaaaaggccgcgttgctggcgtttttccataggctccgcccccctgacgagcatcacaaaaatcgacgctcaagtcagaggtggcgaaacccgacaggactataaagataccaggcgtttccccctggaagctccctcgtgcgctctcctgttccgaccctgccgcttaccggatacctgtccgcctttctcccttcgggaagcgtggcgctttctcatagctcacgctgtaggtatctcagttcggtgtaggtcgttcgctccaagctgggctgtgtgcacgaaccccccgttcagcccgaccgctgcgccttatccggtaactatcgtcttgagtccaacccggtaagacacgacttatcgccactggcagcagccactggtaacaggattagcagagcgaggtatgtaggcggtgctacagagttcttgaagtggtggcctaactacggctacactagaagaacagtatttggtatctgcgctctgctgaagccagttaccttcggaaaaagagttggtagctcttgatccggcaaacaaaccaccgctggtagcggtggtttttttgtttgcaagcagcagattacgcgcagaaaaaaaggatctcaagaagatcctttgatcttttctacggggtctgacgctcagtggaacgaaaactcacgttaagggattttggtcatgagattatcaaaaaggatcttcacctagatccttttaaattaaaaatgaagttttaaatcaatctaaagtatatatgagtaaacttggtctgacagttaccaatgcttaatcagtgaggcacctatctcagcgatctgtctatttcgttcatccatagttgcctgactcggggggggggggcgctgaggtctgcctcgtgaagaaggtgttgctgactcataccaggcctgaatcgccccatcatccagccagaaagtgagggagccacggttgatgagagctttgttgtaggtggaccagttggtgattttgaacttttgctttgccacggaacggtctgcgttgtcgggaagatgcgtgatctgatccttcaactcagcaaaagttcgatttattcaacaaagccgccgtcccgtcaagtcagcgtaatgctctgccagtgttacaaccaattaaccaattctgattagaaaaactcatcgagcatcaaatgaaactgcaatttattcatatcaggattatcaataccatatttttgaaaaagccgtttctgtaatgaaggagaaaactcaccgaggcagttccataggatggcaagatcctggtatcggtctgcgattccgactcgtccaacatcaatacaacctattaatttcccctcgtcaaaaataaggttatcaagtgagaaatcaccatgagtgacgactgaatccggtgagaatggcaaaagcttatgcatttctttccagacttgttcaacaggccagccattacgctcgtcatcaaaatcactcgcatcaaccaaaccgttattcattcgtgattgcgcctgagcgagacgaaatacgcgatcgctgttaaaaggacaattacaaacaggaatcgaatgcaaccggcgcaggaacactgccagcgcatcaacaatattttcacctgaatcaggatattcttctaatacctggaatgctgttttcccggggatcgcagtggtgagtaaccatgcatcatcaggagtacggataaaatgcttgatggtcggaagaggcataaattccgtcagccagtttagtctgaccatctcatctgtaacatcattggcaacgctacctttgccatgtttcagaaacaactctggcgcatcgggcttcccatacaatcgatagattgtcgcacctgattgcccgacattatcgcgagcccatttatacccatataaatcagcatccatgttggaatttaatcgcggcctcgagcaagacgtttcccgttgaatatggctcataacaccccttgtattactgtttatgtaagcagacagttttattgttcatgatgatatatttttatcttgtgcaatgtaacatcagagattttgagacacaacgtggctttccccccccccccattattgaagcatttatcagggttattgtctcatgagcggatacatatttgaatgtatttagaaaaataaacaaataggggttccgcgcacatttccccgaaaagtgccacctgacgtctaagaaaccattattatcatgacattaacctataaaaataggcgtatcacgaggccctttcgtc

SEQ ID NO: 116 - DNA, 1698 bp, Influenza A virus
atgaaggccaaactgctggtgctgctgtgtacctttaccgccacctacgccgacacaatctgtatcggctaccacgccaacaatagcaccgacaccgtggatacagtgctggagaagaacgtgaccgtgacccactctgtgaacctgctggaggacagccacaatggcaagctgtgtctgctgaaaggcattgcccctctgcagctgggcaattgttctgtggccggatggattctgggcaaccccgagtgtgagctgctgatttctaaggagagctggagctacatcgtggagacccccaatcctgagaatggcacctgctaccctggctacttcgccgattacgaggagctgcgcgagcagctgtctagcgtgtccagcttcgagagattcgagatcttccccaaggagtccagctggcctaatcacacagtgacaggcgtgtctgccagctgtagccacaacggcaaaagcagcttctaccggaacctgctgtggctgacaggcaagaatggcctgtacccccaactgagcaagagctacgtgaacaacaaggaaaaggaagtgctggtgctgtggggagtgcaccaccctcccaacatcggaaatcagcgggccctgtaccacacagagaacgcctatgtgagcgtggtgtccagccactacagcagaagattcacccccgagatcgccaagagacccaaagtgagagaccaggagggccggatcaattactactggaccctgctggagcctggcgataccatcatcttcgaggccaacggcaatctgatcgccccttggtatgcctttgccctgagcagaggctttggcagcggcatcatcacaagcaacgcccccatggatgagtgtgatgccaagtgccagacacctcagggcgccatcaatagcagcctgcccttccagaatgtgcaccctgtgaccatcggcgagtgccccaagtatgtgagaagcgccaagctgagaatggtgaccggcctgagaaacatccctagcatccagagcagaggactgtttggagccatcgccggattcatcgagggaggatggacaggcatggtggatggctggtacggctaccaccaccagaatgagcagggctctggatatgccgccgatcagaagtctacccagaacgccatcaacggcatcaccaacaaggtgaacagcgtgatcgagaagatgaacacccagtttaccgctgtgggcaaggagttcaacaagctggagcggaggatggagaacctgaacaagaaggtggacgacggctttctggacatctggacctacaatgccgaactcctggtcctcctcgagaatgagaggaccctggacttccacgacagcaacgtgaagaacctgtatgagaaggtgaagagccagctgaagaacaacgccaaggagatcggcaacggctgcttcgagttctaccacaagtgtaacaacgagtgtatggagagcgtgaagaacggcacctacgactaccctaagtacagcgaggagagcaagctgaaccgggagaagatcgatggcgtgaagctggagagcatgggcgtgtatcagatcctggccatctacagcacagtggcctcttctctggtgctgctggtgtctctgggcgccatctccttttggatgtgctccaacggcagcctgcagtgcaggatctgtatctga

SEQ ID NO: 117 - protein, 565 aa, Influenza A virus
MKAKLLVLLCTFTATYADTICIGYHANNSTDTVDTVLEKNVTVTHSVNLLEDSHNGKLCLLKGIAPLQLGNCSVAGWILGNPECELLISKESWSYIVETPNPENGTCYPGYFADYEELREQLSSVSSFERFEIFPKESSWPNHTVTGVSASCSHNGKSSFYRNLLWLTGKNGLYPQLSKSYVNNKEKEVLVLWGVHHPPNIGNQRALYHTENAYVSVVSSHYSRRFTPEIAKRPKVRDQEGRINYYWTLLEPGDTIIFEANGNLIAPWYAFALSRGFGSGIITSNAPMDECDAKCQTPQGAINSSLPFQNVHPVTIGECPKYVRSAKLRMVTGLRNIPSIQSRGLFGAIAGFIEGGWTGMVDGWYGYHHQNEQGSGYAADQKSTQNAINGITNKVNSVIEKMNTQFTAVGKEFNKLERRMENLNKKVDDGFLDIWTYNAELLVLLENERTLDFHDSNVKNLYEKVKSQLKNNAKEIGNGCFEFYHKCNNECMESVKNGTYDYPKYSEESKLNREKIDGVKLESMGVYQILAIYSTVASSLVLLVSLGAISFWMCSNGSLQCRICI

SEQ ID NO: 118 - DNA, 1698 bp, Influenza A virus
tcagatacagatcctgcactgcaggctgccgttggagcacatccaaaaggagatggcgcccagagacaccagcagcaccagagaagaggccactgtgctgtagatggccaggatctgatacacgcccatgctctccagcttcacgccatcgatcttctcccggttcagcttgctctcctcgctgtacttagggtagtcgtaggtgccgttcttcacgctctccatacactcgttgttacacttgtggtagaactcgaagcagccgttgccgatctccttggcgttgttcttcagctggctcttcaccttctcatacaggttcttcacgttgctgtcgtggaagtccagggtcctctcattctcgaggaggaccaggagttcggcattgtaggtccagatgtccagaaagccgtcgtccaccttcttgttcaggttctccatcctccgctccagcttgttgaactccttgcccacagcggtaaactgggtgttcatcttctcgatcacgctgttcaccttgttggtgatgccgttgatggcgttctgggtagacttctgatcggcggcatatccagagccctgctcattctggtggtggtagccgtaccagccatccaccatgcctgtccatcctccctcgatgaatccggcgatggctccaaacagtcctctgctctggatgctagggatgtttctcaggccggtcaccattctcagcttggcgcttctcacatacttggggcactcgccgatggtcacagggtgcacattctggaagggcaggctgctattgatggcgccctgaggtgtctggcacttggcatcacactcatccatgggggcgttgcttgtgatgatgccgctgccaaagcctctgctcagggcaaaggcataccaaggggcgatcagattgccgttggcctcgaagatgatggtatcgccaggctccagcagggtccagtagtaattgatccggccctcctggtctctcactttgggtctcttggcgatctcgggggtgaatcttctgctgtagtggctggacaccacgctcacataggcgttctctgtgtggtacagggcccgctgatttccgatgttgggagggtggtgcactccccacagcaccagcacttccttttccttgttgttcacgtagctcttgctcagttgggggtacaggccattcttgcctgtcagccacagcaggttccggtagaagctgcttttgccgttgtggctacagctggcagacacgcctgtcactgtgtgattaggccagctggactccttggggaagatctcgaatctctcgaagctggacacgctagacagctgctcgcgcagctcctcgtaatcggcgaagtagccagggtagcaggtgccattctcaggattgggggtctccacgatgtagctccagctctccttagaaatcagcagctcacactcggggttgcccagaatccatccggccacagaacaattgcccagctgcagaggggcaatgcctttcagcagacacagcttgccattgtggctgtcctccagcaggttcacagagtgggtcacggtcacgttcttctccagcactgtatccacggtgtcggtgctattgttggcgtggtagccgatacagattgtgtcggcgtaggtggcggtaaaggtacacagcagcaccagcagtttggccttcat

SEQ ID NO: 119 - DNA, 5827 bp, Influenza A virus
tcgcgcgtttcggtgatgacggtgaaaacctctgacacatgcagctcccggagacggtcacagcttgtctgtaagcggatgccgggagcagacaagcccgtcagggcgcgtcagcgggtgttggcgggtgtcggggctggcttaactatgcggcatcagagcagattgtactgagagtgcaccatatgcggtgtgaaataccgcacagatgcgtaaggagaaaataccgcatcagattggctattggccattgcatacgttgtatccatatcataatatgtacatttatattggctcatgtccaacattaccgccatgttgacattgattattgactagttattaatagtaatcaattacggggtcattagttcatagcccatatatggagttccgcgttacataacttacggtaaatggcccgcctggctgaccgcccaacgacccccgcccattgacgtcaataatgacgtatgttcccatagtaacgccaatagggactttccattgacgtcaatgggtggagtatttacggtaaactgcccacttggcagtacatcaagtgtatcatatgccaagtacgccccctattgacgtcaatgacggtaaatggcccgcctggcattatgcccagtacatgaccttatgggactttcctacttggcagtacatctacgtattagtcatcgctattaccatggtgatgcggttttggcagtacatcaatgggcgtggatagcggtttgactcacggggatttccaagtctccaccccattgacgtcaatgggagtttgttttggcaccaaaatcaacgggactttccaaaatgtcgtaacaactccgccccattgacgcaaatgggcggtaggcgtgtacggtgggaggtctatataagcagagctcgtttagtgaaccgtcagatcgcctggagacgccatccacgctgttttgacctccatagaagacaccgggaccgatccagcctccatcggctcgcatctctccttcacgcgcccgccgccttacctgaggccgccatccacgccggttgagtcgcgttctgccgcctcccgcctgtggtgcctcctgaactacgtccgccgtctaggtaagtttagagctcaggtcgagaccgggcctttgtccggcgctcccttggagcctacctagactcagccggctctccacgctttgcctgaccctgcttgctcaactctagttaacggtggagggcagtgtagtctgagcagtactcgttgctgccgcgcgcgccaccagacataatagctgacagactaacagactgttcctttccatgggtcttttctgcagtcaccgtcgtcgacacgtgtgatcagatatcgcggccgctctagagatatcgccaccatgaaccccaaccagaagatcatcaccatcggcagcatcagcatcgccatcggcatcattagcctgatgctgcagatcggcaacatcatcagcatctgggccagccacagcattcagaccggcagccagaatcacacaggcgtgtgcaaccagcgcatcatcacctacgagaacagcacctgggtgaaccacacctacgtgaacatcaacaacaccaacgtggtggccggcaaggataagacaagcgtgaccctggccggcaatagcagcctgtgtagcatcagcggctgggccatctacaccaaggacaacagcatcaggatcggcagcaagggcgacgtgttcgtgatcagagagcccttcatcagctgcagccacctggaatgcaggaccttcttcctgacacaaggcgctctgctgaacgataagcacagcaacggcaccgtgaaggacagaagcccctacagagccctgatgtcttgtcctctgggcgaggctcctagcccctacaacagcaagtttgagagcgtggcctggtctgcctctgcctgtcacgatggcatgggctggctgacaatcggcatctccggacctgataatggcgccgtggccgtgctgaagtacaacggcatcatcacagagaccatcaagagctggaagaagagaatcctgcggacccaggaaagcgagtgtgtctgcgtgaacggcagctgcttcaccatcatgaccgacggaccttctaatggcgctgccagctacaagatcttcaagatcgagaagggcaaggtgaccaagagcatcgagctgaacgcccccaacttccactacgaggaatgcagctgctaccctgacaccggcacagtgatgtgcgtgtgcagagacaactggcacggcagcaatagaccctgggtgtccttcaaccagaacctggactaccagatcggctacatttgcagcggcgtgttcggcgacaaccctagacctaaggatggcgagggcagctgtaatcctgtgaccgtggatggcgctgatggcgtgaagggcttcagctacaagtacggcaatggcgtgtggatcggcaggaccaagtccaaccggctgaggaagggcttcgagatgatctgggaccccaatggctggaccgacaccgatagcgacttcagcgtgaagcaggatgtggtggccatcaccgattggagcggctacagcggctcttttgtgcagcaccctgagctgacaggcctggactgcatcagaccctgcttttgggtggaactggtccggggcctgcctagagagaataccaccatctggaccagcggcagcagcatctccttttgcggcgtgaacagcgataccgccaattggtcttggcctgatggcgccgagctgcccttcaccatcgacaagtgatgaacacgtgggatccagatctgctgtgccttctagttgccagccatctgttgtttgcccctcccccgtgccttccttgaccctggaaggtgccactcccactgtcctttcctaataaaatgaggaaattgcatcgcattgtctgagtaggtgtcattctattctggggggtggggtggggcaggacagcaagggggaggattgggaagacaatagcaggcatgctggggatgcggtgggctctatgggtacccaggtgctgaagaattgacccggttcctcctgggccagaaagaagcaggcacatccccttctctgtgacacaccctgtccacgcccctggttcttagttccagccccactcataggacactcatagctcaggagggctccgccttcaatcccacccgctaaagtacttggagcggtctctccctccctcatcagcccaccaaaccaaacctagcctccaagagtgggaagaaattaaagcaagataggctattaagtgcagagggagagaaaatgcctccaacatgtgaggaagtaatgagagaaatcatagaattttaaggccatcatggccttaatcttccgcttcctcgctcactgactcgctgcgctcggtcgttcggctgcggcgagcggtatcagctcactcaaaggcggtaatacggttatccacagaatcaggggataacgcaggaaagaacatgtgagcaaaaggccagcaaaaggccaggaaccgtaaaaaggccgcgttgctggcgtttttccataggctccgcccccctgacgagcatcacaaaaatcgacgctcaagtcagaggtggcgaaacccgacaggactataaagataccaggcgtttccccctggaagctccctcgtgcgctctcctgttccgaccctgccgcttaccggatacctgtccgcctttctcccttcgggaagcgtggcgctttctcatagctcacgctgtaggtatctcagttcggtgtaggtcgttcgctccaagctgggctgtgtgcacgaaccccccgttcagcccgaccgctgcgccttatccggtaactatcgtcttgagtccaacccggtaagacacgacttatcgccactggcagcagccactggtaacaggattagcagagcgaggtatgtaggcggtgctacagagttcttgaagtggtggcctaactacggctacactagaagaacagtatttggtatctgcgctctgctgaagccagttaccttcggaaaaagagttggtagctcttgatccggcaaacaaaccaccgctggtagcggtggtttttttgtttgcaagcagcagattacgcgcagaaaaaaaggatctcaagaagatcctttgatcttttctacggggtctgacgctcagtggaacgaaaactcacgttaagggattttggtcatgagattatcaaaaaggatcttcacctagatccttttaaattaaaaatgaagttttaaatcaatctaaagtatatatgagtaaacttggtctgacagttaccaatgcttaatcagtgaggcacctatctcagcgatctgtctatttcgttcatccatagttgcctgactcggggggggggggcgctgaggtctgcctcgtgaagaaggtgttgctgactcataccaggcctgaatcgccccatcatccagccagaaagtgagggagccacggttgatgagagctttgttgtaggtggaccagttggtgattttgaacttttgctttgccacggaacggtctgcgttgtcgggaagatgcgtgatctgatccttcaactcagcaaaagttcgatttattcaacaaagccgccgtcccgtcaagtcagcgtaatgctctgccagtgttacaaccaattaaccaattctgattagaaaaactcatcgagcatcaaatgaaactgcaatttattcatatcaggattatcaataccatatttttgaaaaagccgtttctgtaatgaaggagaaaactcaccgaggcagttccataggatggcaagatcctggtatcggtctgcgattccgactcgtccaacatcaatacaacctattaatttcccctcgtcaaaaataaggttatcaagtgagaaatcaccatgagtgacgactgaatccggtgagaatggcaaaagcttatgcatttctttccagacttgttcaacaggccagccattacgctcgtcatcaaaatcactcgcatcaaccaaaccgttattcattcgtgattgcgcctgagcgagacgaaatacgcgatcgctgttaaaaggacaattacaaacaggaatcgaatgcaaccggcgcaggaacactgccagcgcatcaacaatattttcacctgaatcaggatattcttctaatacctggaatgctgttttcccggggatcgcagtggtgagtaaccatgcatcatcaggagtacggataaaatgcttgatggtcggaagaggcataaattccgtcagccagtttagtctgaccatctcatctgtaacatcattggcaacgctacctttgccatgtttcagaaacaactctggcgcatcgggcttcccatacaatcgatagattgtcgcacctgattgcccgacattatcgcgagcccatttatacccatataaatcagcatccatgttggaatttaatcgcggcctcgagcaagacgtttcccgttgaatatggctcataacaccccttgtattactgtttatgtaagcagacagttttattgttcatgatgatatatttttatcttgtgcaatgtaacatcagagattttgagacacaacgtggctttccccccccccccattattgaagcatttatcagggttattgtctcatgagcggatacatatttgaatgtatttagaaaaataaacaaataggggttccgcgcacatttccccgaaaagtgccacctgacgtctaagaaaccattattatcatgacattaacctataaaaataggcgtatcacgaggccctttcgtc

SEQ ID NO: 120 - DNA, 1416 bp, Influenza A virus
  CDS (1)..(1416)
atgaaccccaaccagaagatcatcaccatcggcagcatcagcatcgccatcggcatcattagcctgatgctgcagatcggcaacatcatcagcatctgggccagccacagcattcagaccggcagccagaatcacacaggcgtgtgcaaccagcgcatcatcacctacgagaacagcacctgggtgaaccacacctacgtgaacatcaacaacaccaacgtggtggccggcaaggataagacaagcgtgaccctggccggcaatagcagcctgtgtagcatcagcggctgggccatctacaccaaggacaacagcatcaggatcggcagcaagggcgacgtgttcgtgatcagagagcccttcatcagctgcagccacctggaatgcaggaccttcttcctgacacaaggcgctctgctgaacgataagcacagcaacggcaccgtgaaggacagaagcccctacagagccctgatgtcttgtcctctgggcgaggctcctagcccctacaacagcaagtttgagagcgtggcctggtctgcctctgcctgtcacgatggcatgggctggctgacaatcggcatctccggacctgataatggcgccgtggccgtgctgaagtacaacggcatcatcacagagaccatcaagagctggaagaagagaatcctgcggacccaggaaagcgagtgtgtctgcgtgaacggcagctgcttcaccatcatgaccgacggaccttctaatggcgctgccagctacaagatcttcaagatcgagaagggcaaggtgaccaagagcatcgagctgaacgcccccaacttccactacgaggaatgcagctgctaccctgacaccggcacagtgatgtgcgtgtgcagagacaactggcacggcagcaatagaccctgggtgtccttcaaccagaacctggactaccagatcggctacatttgcagcggcgtgttcggcgacaaccctagacctaaggatggcgagggcagctgtaatcctgtgaccgtggatggcgctgatggcgtgaagggcttcagctacaagtacggcaatggcgtgtggatcggcaggaccaagtccaaccggctgaggaagggcttcgagatgatctgggaccccaatggctggaccgacaccgatagcgacttcagcgtgaagcaggatgtggtggccatcaccgattggagcggctacagcggctcttttgtgcagcaccctgagctgacaggcctggactgcatcagaccctgcttttgggtggaactggtccggggcctgcctagagagaataccaccatctggaccagcggcagcagcatctccttttgcggcgtgaacagcgataccgccaattggtcttggcctgatggcgccgagctgcccttcaccatcgacaagtgatga

SEQ ID NO: 121 - protein, 470 aa, Influenza A virus
MNPNQKIITIGSISIAIGIISLMLQIGNIISIWASHSIQTGSQNHTGVCNQRIITYENSTWVNHTYVNINNTNVVAGKDKTSVTLAGNSSLCSISGWAIYTKDNSIRIGSKGDVFVIREPFISCSHLECRTFFLTQGALLNDKHSNGTVKDRSPYRALMSCPLGEAPSPYNSKFESVAWSASACHDGMGWLTIGISGPDNGAVAVLKYNGIITETIKSWKKRILRTQESECVCVNGSCFTIMTDGPSNGAASYKIFKIEKGKVTKSIELNAPNFHYEECSCYPDTGTVMCVCRDNWHGSNRPWVSFNQNLDYQIGYICSGVFGDNPRPKDGEGSCNPVTVDGADGVKGFSYKYGNGVWIGRTKSNRLRKGFEMIWDPNGWTDTDSDFSVKQDVVAITDWSGYSGSFVQHPELTGLDCIRPCFWVELVRGLPRENTTIWTSGSSISFCGVNSDTANWSWPDGAELPFTIDK

SEQ ID NO: 122 - DNA, 1416 bp, Influenza A virus
tcatcacttgtcgatggtgaagggcagctcggcgccatcaggccaagaccaattggcggtatcgctgttcacgccgcaaaaggagatgctgctgccgctggtccagatggtggtattctctctaggcaggccccggaccagttccacccaaaagcagggtctgatgcagtccaggcctgtcagctcagggtgctgcacaaaagagccgctgtagccgctccaatcggtgatggccaccacatcctgcttcacgctgaagtcgctatcggtgtcggtccagccattggggtcccagatcatctcgaagcccttcctcagccggttggacttggtcctgccgatccacacgccattgccgtacttgtagctgaagcccttcacgccatcagcgccatccacggtcacaggattacagctgccctcgccatccttaggtctagggttgtcgccgaacacgccgctgcaaatgtagccgatctggtagtccaggttctggttgaaggacacccagggtctattgctgccgtgccagttgtctctgcacacgcacatcactgtgccggtgtcagggtagcagctgcattcctcgtagtggaagttgggggcgttcagctcgatgctcttggtcaccttgcccttctcgatcttgaagatcttgtagctggcagcgccattagaaggtccgtcggtcatgatggtgaagcagctgccgttcacgcagacacactcgctttcctgggtccgcaggattctcttcttccagctcttgatggtctctgtgatgatgccgttgtacttcagcacggccacggcgccattatcaggtccggagatgccgattgtcagccagcccatgccatcgtgacaggcagaggcagaccaggccacgctctcaaacttgctgttgtaggggctaggagcctcgcccagaggacaagacatcagggctctgtaggggcttctgtccttcacggtgccgttgctgtgcttatcgttcagcagagcgccttgtgtcaggaagaaggtcctgcattccaggtggctgcagctgatgaagggctctctgatcacgaacacgtcgcccttgctgccgatcctgatgctgttgtccttggtgtagatggcccagccgctgatgctacacaggctgctattgccggccagggtcacgcttgtcttatccttgccggccaccacgttggtgttgttgatgttcacgtaggtgtggttcacccaggtgctgttctcgtaggtgatgatgcgctggttgcacacgcctgtgtgattctggctgccggtctgaatgctgtggctggcccagatgctgatgatgttgccgatctgcagcatcaggctaatgatgccgatggcgatgctgatgctgccgatggtgatgatcttctggttggggttcat
